(19) United States
(12) Patent Application Publication
(10) Pub. No.: US 2005/0026189 A1
(43) Pub. Date: Feb. 3, 2005

(54) Microbial operons

(76) Inventors: Liangsu Wang, San Diego, CA (US); Carlos Zamudio, La Jolla, CA (US)

Correspondence Address: KNOBBE MARTENS OLSON & BEAR LLP, 2040 MAIN STREET, FOURTEENTH FLOOR, IRVINE, CA, 92614, US

(21) Appl. No.: 10/857,625

(22) Filed: May 28, 2004

Related U.S. Application Data
(60) Provisional application No. 60/474,768, filed on May 29, 2003.

(51) Int. Cl. C12Q 1/68; G06F 19/00; G01N 33/48; G01N 33/50

(52) U.S. Cl. 435/6; 702/20

(57) ABSTRACT

Described herein is a method for predicting operons in prokaryotes. Also described herein are vectors comprising operons predicted using the this method as well as methods of using antisense nucleic acids complementary to at least a portion of a predicted proliferation-required operon to inhibit cellular proliferation. Methods of using such antisense nucleic acids to sensitize cells for use in assays to identify compounds which possess the ability to inhibit cellular proliferation are also described.

### RELATED APPLICATIONS

[0001] This application is a nonprovisional of and claims priority under 35 U.S.C. § 119(e) to U.S. Provisional Patent Application Ser. No. 60/474,768, entitled MICROBIAL OPERONS, filed May 29, 2003, the disclosure of which is incorporated herein by reference in its entirety.

### SEQUENCE LISTING

[0002] The present application is being filed along with duplicate copies of a CD-ROM marked “Copy 1” and “Copy 2” containing a Sequence Listing in electronic format. The duplicate copies of the CD-ROM each contain a file entitled ELITRA036A.ST25.txt created on May 27, 2004 which is 2,252,898 bytes in size. The information on these duplicate CD-ROMs is incorporated herein by reference in its entirety.

### TECHNICAL FIELD

[0003] The invention described herein relates to genomic organization and operon structure as well as their application to lead compound investigations. In particular, the invention relates to methods for predicting microbial operons and the use of operons comprising genes encoding products whose inhibition reduces proliferation as targets for identifying compounds that inhibit proliferation.

### BACKGROUND

[0004] Elucidation of operon structure and organization is becoming increasingly important to the newly emerging practices in drug discovery which are based on the identification of genes and gene products that are required for microbial proliferation. Although many proliferation-required genes are monocistronic, a large number of such genes are present in the cell as part of a polycistronic operon. When one or more proliferation-required genes are interspersed in an operon with nonessential genes, methods for determining which of the genes in the operon are essential can be complicated by polar effects. For example, the inhibition of a single nonessential gene in an operon may result in the inhibition of one or more proliferation-required genes that are present in the same operon. If it is unknown that the nonessential gene is part of the operon, then the nonessential gene may be misidentified as a proliferation-required gene. Thus, without the knowledge of the operon structure of an organism, many nonessential genes would remain misidentified as required for proliferation. Given the possibility that the genes encoding true drug targets can be masked by polar effects it would be useful to predict the structure of operons of targeted organisms.

[0005] With more and more genomic sequences becoming available, it becomes possible to elucidate operon structure yet numerous problems exist. For example, it remains extremely difficult to predict operons in organisms solely from their genome sequences or in the relative absence of extensive experimental data. For the methods which are currently used for predicting operons based on raw genome sequence, there remain serious concerns with the accuracy of the prediction.

[0006] Staphylococcus aureus is an example of a microbial pathogen for which there exists a wealth of genomic sequence data but limited experimental evidence by which to determine operons. This gram-positive bacterium is a major human pathogen causing both community-acquired and hospital-acquired infections. Antibiotic resistant strains of Staphylococcus aureus have recently been identified, including those that are now resistant to all available antibiotics, thereby severely limiting the options of care available to physicians. Accordingly, a method of accurate operon structure prediction, which would aid in the identification of novel drug targets thereby furthering the development of new antimicrobial compounds effective against multiple drug resistant microbes, such as Staphylococcus aureus, would be of enormous utility. Likewise, methods which permit the screening of test compounds to identify compounds which inhibit microbial proliferation and methods which permit identification of the specific gene which encodes the gene product that is the target of an antimicrobial compound would provide useful information for further drug development.

### SUMMARY OF THE INVENTION

[0007] Identification of operon structure and organization within a genome may desirably aid in understanding gene regulation and function in prokaryotic organisms. In various embodiments, the present teachings describe a consensus-based approach to operon identification that integrates a number of complimentary operon prediction methods. The disclosed methods may desirably improve the identification and association of co-transcribed genes within a prokaryotic organism's genome as compared to conventional systems employing singular prediction models.

[0008] In one aspect, operon prediction according to the present teachings may be used to score the likelihood that adjacent gene pairs within a prokaryotic organism's genome are co-transcribed. Gene pairs are identified and segregated into discrete bins indicative of distinct operons on the basis of a calculated score using the consensus operon prediction model. Operon boundaries are identified by comparing the score associated with a selected gene pair with a threshold. Using this approach, the predicted operons, the genes contained therein, and the associated operon boundaries may be mapped back to the prokaryotic organism's genome to generate an annotated genomic map for the selected prokaryotic organism. The genomic map may also be annotated at the intersections for each adjacent gene pair to indicate the probability that the genes of the gene pair are contained in the same operon.

[0009] An application of the present teachings is demonstrated for the prokaryotic organism, Staphylococcus aureus wherein over 90% of the identified gene pairs were associated with operon prediction scores indicating a high confidence of either being in distinct operons or in the same operon. Application of an empirically derived threshold for this organism, predicted over 1397 operons from the protein-encoding genes in the Staphylococcus aureus strain Mu50 genome. Of the identified operons, approximately 62% were predicted to be monocistronic and approximately 38% were predicted to be polycistronic. Comparison with experimentally determined values for Staphylococcus aureus operons from literature sources indicates that the disclosed methods successfully predicted operon boundaries and genes contained within the each operon interior with a high degree of accuracy.

[0010] As will be described in greater detail hereinbelow, operon prediction according to the present teachings provides a means to identify operons with a high degree of accuracy even when applied to less-well characterized genomes wherein limited experimental evidence for operon structure is available. Furthermore, the consensus-based approach to operon prediction may be readily modified by the inclusion or exclusion of various operon prediction approaches as determined by the investigator. This flexibility allows an investigator to adjust the stringency of the analysis and to make use of available data and information that may vary from one organism to the next. Additionally, the methods may be customized to include operon prediction methods other than those specifically disclosed to thereby accommodate other techniques and provide improved operon identification capabilities as compared using a singular approach alone.

[0011] Further aspects of the present invention are described in the numbered paragraphs below.

[0012] 1. A method for predicting operons, the method comprising:
[0013] identifying consecutive genes within at least a portion of a target prokaryotic organism's genome;
[0014] determining each gene's orientation in the genome relative to its flanking genes;
[0015] segregating the genes into a plurality of bins on the basis of their orientation such that consecutive genes in the same orientation are grouped into the same bin;
[0016] performing a composite operon prediction analysis comprising pairing each gene within a selected bin with its respective flanking genes and associating a confidence score with each gene pair, wherein the confidence score reflects the likelihood that a selected gene pair resides in the same operon using the criteria of orientation and the application of at least one operon prediction method;
[0017] determining operon boundaries by identifying gene pairs having confidence scores that fall below a selected threshold; and
[0018] associating genes contained between operon boundaries as putative operons.

[0019] 2. The method of Paragraph 1, wherein the target prokaryotic organism is Bacillus subtilis.

[0020] 3. The method of Paragraph 1, wherein the target prokaryotic organism is Escherichia coli.

[0021] 4. The method of Paragraph 1, wherein the target prokaryotic organism is selected from the group consisting of Aquifex aeolicus, Borrelia burgdorferi, Bacillus halodurans, Buchnera species, Clostridium acetobutylicum, Caulobacter crescentus, Campylobacter jejun, Chlamydia pneumoniae, Chlamydia trachomatis, Haemophilus influenzae, Helicobacter pylori, Listeria monocytogenes, Listeria innocua, Lactococcus lactis, Mycoplasma genitalium, Mycobacterium leprae, Mycoplasma pneumoniae, Mycoplasma pulmonis, Mycobacterium tuberculosis, Neisseria meningitides, Pseudomonas aeruginosa, Pasteurella multocida, Rickettsia conorii, Rickettsia prowazekii, Sinorhizobium meliloti, Streptococcus pneumoniae, Streptococcus pyogenes, Salmonella typhi, Salmonella typhimurium, Synechocystis species, Thermotoga maritime, Treponema pallidum, Ureaplasma urealyticum, Vibrio cholerae, Xylella fastidiosa, Yersinia pestis and Enterococcus facaelis.

[0022] 5. The method of Paragraph 1, wherein the target prokaryotic organism is selected from the group consisting of Acinetobacter baumannii, Anaplasma marginale, Bacillus anthracis, Bacteroides fragilis, Bordetella pertussis, Borrelia burgdorferi, Brucella abortus, Brucella melitensis, Burkholderia cepacia, Burkholderia fungorum, Burkholderia mallei, Campylobacter jejuni, Chlamydia pneumoniae, Chlamydia trachomatis, Clostridium acetobutylicum, Clostridium botulinum, Clostridium difficile, Clostridium perfringens, Corynebacterium diptheriae, Coxiella burnetii, Enterobacter cloacae, Enterococcus faecalis, Enterococcus faecium, Escherichia coli, Francisella tularensis, Haemophilus influenzae, Helicobacter pylori, Klebsiella pneumoniae, Legionella pneumophila, Listeria monocytogenes, Moraxella catarrhalis, Mycobacterium avium, Mycobacterium bovis, Mycobacterium leprae, Mycobacterium tuberculosis, Mycoplasma genitalium, Mycoplasma pneumoniae, Neisseria gonorrhoeae, Neisseria meningitidis, Nocardia asteroides, Pasteurella haemolytica, Pasteurella multocida, Proteus mirabilis, Proteus vulgaris, Pseudomonas aeruginosa, Pseudomonas putida, Pseudomonas syringae, Rickettsia rickettsii, Rochalimaea quintana, Salmonella bongori, Salmonella cholerasuis, Salmonella enterica, Salmonella paratyphi, Salmonella typhi, Salmonella typhimurium, Shigella boydii, Shigella dysenteriae, Shigella flexneri, Shigella sonnei, Staphylococcus aureus, Staphylococcus epidermidis, Staphylococcus haemolyticus, Streptococcus pneumoniae, Streptococcus mutans, Streptococcus pyogenes, Treponema pallidum, Ureaplasma urealyticum, Vibrio cholerae, Vibrio parahaemolyticus, Vibrio vulnificans, Yersinia enterocolitica, Yersinia pestis and any species falling within the genera of any of the above species.

[0023] 6. The method of Paragraph 1, wherein the target prokaryotic organism is a Gram positive bacterium.

[0024] 7. The method of Paragraph 1, wherein the target prokaryotic organism is selected from the group consisting of Bacillus anthracis, Clostridium acetobutylicum, Clostridium botulinum, Clostridium difficile, Clostridium perfringens, Corynebacterium diptheriae, Enterococcus faecalis, Enterococcus faecium, Listeria monocytogenes, Mycobacterium avium, Mycobacterium bovis, Mycobacterium leprae, Mycobacterium tuberculosis, Nocardia asteroides, Staphylococcus aureus, Staphylococcus epidermidis, Staphylococcus haemolyticus, Streptococcus pneumoniae, Streptococcus mutans, Streptococcus pyogenes and any species falling within the genera of any of the above species.

[0025] 8. The method of Paragraph 1, wherein the target prokaryotic organism is Staphylococcus aureus.

[0026] 9. The method of Paragraph 8, wherein said Staphylococcus aureus is strain Mu50.

[0027] 10. The method of Paragraph 1, wherein segregation of the genes into the plurality of bins further comprises identifying monocistronic operons by identifying genes where both the 5′ and 3′ flanking genes are oppositely oriented relative to the selected gene.

[0028] 11. The method of Paragraph 10, wherein monocistronic operons are excluded from further analysis.

[0029] 12. The method of Paragraph 1, wherein segregation of the genes into the plurality of bins further comprises identifying genes having at least one 5′ or 3′ flanking gene in the same orientation.

[0030] 13. The method of Paragraph 12, wherein only putative polycistronic operons are subjected to composite operon prediction analysis.

[0031] 14. The method of Paragraph 1, wherein the results from the at least one operon prediction method are evaluated with respect to gene pair orientation and according to a pre-selected scoring criteria to determine the confidence score value associated with each gene pair.

[0032] 15. The method of Paragraph 1, wherein the at least one operon prediction method comprises an intergenic distance analysis.

[0033] 16. The method of Paragraph 1, wherein the at least one operon prediction method comprises a pairwise assessment of gene conservation.

[0034] 17. The method of Paragraph 16, wherein the pairwise assessment of gene conservation comprises identifying gene pairs associated with the target organism that are conserved with respect to at least one comparison organism.

[0035] 18. The method of Paragraph 16, wherein the pairwise assessment of gene conservation further comprises identifying conserved gene pairs associated with the target organism that are adjacent and oriented in the same direction and further possess an adjacent gene pair homolog in at least one comparison organism having a similar orientation.

[0036] 19. The method of Paragraph 18, further comprising ordering the plurality of conserved gene pairs to reflect their relative coordinates with respect to the target prokaryotic organism genome.

[0037] 20. The method of Paragraph 1, wherein the at least one operon prediction method comprises a conserved gene cluster analysis.

[0038] 21. The method of Paragraph 20, wherein the conserved gene cluster analysis further comprises the steps of:
[0039] (a) identifying gene pairs contained in the bins for the target organism having an intergenic distance below a selected intergenic distance threshold;
[0040] (b) comparing the sequence and location of identified target organism gene pairs with homologous gene pairs from at least one comparison organism to identify conserved gene pairs between the target organism and the comparison organism;
[0041] (c) repeating steps (a)-(b) for each remaining comparison organism; and
[0042] (d) evaluating the conserved gene pairs between the target organism and each comparison organism with respect to one another to identify conserved gene clusters.

[0043] 22. The method of Paragraph 21, wherein the selected intergenic distance threshold is approximately 300 bp.

[0044] 23. The method of Paragraph 21, wherein the conserved gene cluster analysis further comprises identifying orthologs representative of conserved order between genes in each gene cluster.

[0045] 24. The method of Paragraph 21, wherein orthologs are identified using a BLASTP or BLASTN sequence evaluation application.

[0046] 25. The method of Paragraph 20, wherein the conserved gene cluster analysis further comprises pairwise gene assessment in the target organism relative to homologous gene pairs in at least one comparison organism to identify gene pairs whose sequence and location are conserved across the genomes of the at least one comparison organisms.

[0047] 26. The method of Paragraph 1, wherein the at least one operon prediction method comprises a transcriptional terminator analysis.

[0048] 27. The method of Paragraph 26, wherein the transcriptional terminator analysis further comprises:
[0049] extracting a portion of the sequence on both sides of a stop codon associated with each gene;
[0050] evaluating the portion of the sequence on both sides of the stop codon of each gene to identify prospective transcriptional terminators; and
[0051] associating a transcriptional terminator value with each gene on the basis of identified prospective transcriptional terminators.

[0052] 28. The method of Paragraph 27, wherein the portion of the sequence on both sides of the stop codon associated with each gene is evaluated to identify prospective prokaryotic factor-independent transcription terminators.

[0053] 29. The method of Paragraph 28, wherein a region encompassing approximately −20 to approximately +200 bases around the stop codon associated with each gene is evaluated for transcriptional terminators.

[0054] 30. The method of Paragraph 28, wherein the prokaryotic factor-independent transcriptional terminators are identified using a third-party software application.

[0055] 31. The method of Paragraph 30, wherein the third-party software application used to identify the prokaryotic factor-independent transcriptional terminators is Terminator, part of the GCG Wisconsin Package of Programs.

[0056] 32. The method of Paragraph 31, wherein putative terminators with an S-value greater than approximately 0 are identified as prokaryotic factor-independent transcriptional terminators.

[0057] 33. The method of Paragraph 1, wherein the confidence score reflects a numerical assessment of the likelihood that the genes of the gene pair reside in the same operon.

[0058] 34. The method of Paragraph 33, wherein the confidence score is used to further classify each gene pair as being part of distinct operons or being part of the same operon.

[0059] 35. The method of Paragraph 1, wherein a numerical value is associated with the confidence score and reflects the likelihood of selected genes residing in the same operon, wherein the numerical value is selected from the group consisting of:
[0060] (a) a first numerical value which indicates that the genes of the gene pair are unlikely to be in the same operon if any of the following three criteria are met:
   [0061] (i) the selected genes are in different orientations;
   [0062] (ii) the intergenic distance between the selected genes is greater than approximately 300 bp; or
   [0063] (iii) the intergenic distance between the selected genes is greater than 100 bp and there are no conserved gene clusters;
[0064] (b) a second numerical value which indicates that the selected genes might be in the same operon but the confidence is low if:
   [0065] (i) the selected genes have an intergenic distance greater than approximately 60 bp,
   [0066] (ii) the selected genes are conserved over approximately five or fewer comparison organisms, and
   [0067] (iii) a predicted transcriptional terminator exists between the selected genes;
[0068] (c) a third numerical value which indicates that the selected genes are probably in the same operon if any of the following criteria are met:
   [0069] (i) the selected genes are conserved in at least approximately 10 comparison organisms;
   [0070] (ii) the intergenic distance between the selected genes is approximately less than or equal to 30 bp;
   [0071] or if at least two of the following requirements are met:
   [0072] (i) the intergenic distance between the selected genes is approximately less than or equal to 50 bp;
   [0073] (ii) no predicted transcriptional terminators exist; or
   [0074] (iii) the selected genes are conserved in approximately greater or equal to 5 comparison organisms but less than approximately 10 comparison organisms;
[0075] (d) a fourth numerical value which indicates that the selected genes are likely to reside in the same operon if the genes do not meet any of the above requirements.

[0076] 36. A method for predicting operons comprising:
[0077] (a) identifying consecutive genes within at least a portion of the genome of a target organism;
[0078] (b) determining each gene's orientation in the genome relative to its flanking genes;
[0079] (c) segregating consecutive genes in the same orientation into the same bin;
[0080] (d) identifying the intergenic distance between each consecutive gene and its flanking genes;
[0081] (e) identifying orthologous genes in at least one comparison organism that are in the same order and orientation as the corresponding genes in the target organism;
[0082] (f) predicting transcriptional terminators in the sequence flanking the stop codon of each gene;
[0083] (g) predicting the likelihood that two consecutive genes in the same bin are in the same operon by performing at least one of steps (h)-(l) below:
[0084] (h) predicting that two selected consecutive genes in the same bin are unlikely to be in the same operon if any of the following three criteria are met:
   [0085] (i) the two consecutive genes are in different orientations;
   [0086] (ii) the intergenic distance between the two consecutive genes is greater than approximately 300 bp; or
   [0087] (iii) the intergenic distance between the two consecutive genes is greater than 100 bp and there are no conserved gene clusters;
[0088] (i) predicting that two consecutive genes in a multi-gene bin have a low likelihood of being in the same operon if:
   [0089] (i) the two consecutive genes have an intergenic distance greater than approximately 60 bp,
   [0090] (ii) the two consecutive genes are conserved over approximately 5 or less comparison organisms, and
   [0091] (iii) a predicted transcriptional terminator exists between the two consecutive genes;
[0092] (j) predicting that two consecutive genes are probably in the same operon if any of the following criteria are met:
   [0093] (i) the two consecutive genes are conserved in at least approximately 10 comparison organisms;
   [0094] (ii) the intergenic distance between the two consecutive genes is approximately less than or equal to 30 bp;
[0095] (k) predicting that two consecutive genes are probably in the same operon if at least two of the following requirements were met:
   [0096] (i) the intergenic distance between the two consecutive genes is approximately less than or equal to 50 bp;
   [0097] (ii) no predicted transcriptional terminators between the two consecutive genes exist; or
   [0098] (iii) the two consecutive genes are conserved in approximately greater than or equal to 5 comparison organisms but less than approximately 10 comparison organisms;
[0099] (l) predicting that two consecutive genes are probably in the same operon if the consecutive genes do not meet any of the above requirements.

[0100] 37. A computer-based system for predicting operons within a target prokaryotic organism, the system comprising:
[0101] a database for storing information describing a plurality of genes relating to at least a portion of the target organism's genome;
[0102] a program which performs the operations of;
   [0103] identifying consecutive genes from the plurality of genes stored in the database;
   [0104] determining the orientation of each consecutive gene relative to its flanking genes;
   [0105] segregating the consecutive genes into a plurality of bins on the basis of their orientation such that consecutive genes in the same orientation are grouped into the same bin;
   [0106] performing a composite operon prediction analysis comprising pairing each consecutive gene within a selected bin with its respective flanking genes and associating a confidence score with each gene pair, wherein the confidence score reflects the likelihood that a selected gene pair resides in the same operon using the criteria of orientation and the application of at least one operon prediction method;
   [0107] determining operon boundaries by identifying gene pairs having confidence scores that fall below a selected threshold; and
   [0108] associating genes contained between operon boundaries as operons.

[0109] 38. The system of Paragraph 37 wherein the target prokaryotic organism is Bacillus subtilis.

[0110] 39. The system of Paragraph 37, wherein the target prokaryotic organism is Escherichia coli.

[0111] 40. The system of Paragraph 37, wherein the target prokaryotic organism is selected from the group consisting of Aquifex aeolicus, Borrelia burgdorferi, Bacillus halodurans, Buchnera species, Clostridium acetobutylicum, Caulobacter crescentus, Campylobacter jejun, Chlamydia pneumoniae, Chlamydia trachomatis, Haemophilus influenzae, Helicobacter pylori, Listeria monocytogenes, Listeria innocua, Lactococcus lactis, Mycoplasma genitalium, Mycobacterium leprae, Mycoplasma pneumoniae, Mycoplasma pulmonis, Mycobacterium tuberculosis, Neisseria meningitides, Pseudomonas aeruginosa, Pasteurella multocida, Rickettsia conorii, Rickettsia prowazekii, Sinorhizobium meliloti, Streptococcus pneumoniae, Streptococcus pyogenes, Salmonella typhi, Salmonella typhimurium, Synechocystis species, Thermotoga maritime, Treponema pallidum, Ureaplasma urealyticum, Vibrio cholerae, Xylella fastidiosa, Yersinia pestis and Enterococcus facaelis.

[0112] 41. The system of Paragraph 37, wherein the target prokaryotic organism is selected from the group consisting of Acinetobacter baumannii, Anaplasma marginale, Bacillus anthracis, Bacteroides fragilis, Bordetella pertussis, Borrelia burgdorferi, Brucella abortus, Brucella melitensis, Burkholderia cepacia, Burkholderia fungorum, Burkholderia mallei, Campylobacter jejuni, Chlamydia pneumoniae, Chlamydia trachomatis, Clostridium acetobutylicum, Clostridium botulinum, Clostridium difficile, Clostridium perfringens, Corynebacterium diptheriae, Coxiella burnetii, Enterobacter cloacae, Enterococcus faecalis, Enterococcus faecium, Escherichia coli, Francisella tularensis, Haemophilus influenzae, Helicobacter pylori, Klebsiella pneumoniae, Legionella pneumophila, Listeria monocytogenes, Moraxella catarrhalis, Mycobacterium avium, Mycobacterium bovis, Mycobacterium leprae, Mycobacterium tuberculosis, Mycoplasma genitalium, Mycoplasma pneumoniae, Neisseria gonorrhoeae, Neisseria meningitidis, Nocardia asteroides, Pasteurella haemolytica, Pasteurella multocida, Proteus mirabilis, Proteus vulgaris, Pseudomonas aeruginosa, Pseudomonas putida, Pseudomonas syringae, Rickettsia rickettsii, Rochalimaea quintana, Salmonella bongori, Salmonella cholerasuis, Salmonella enterica, Salmonella paratyphi, Salmonella typhi, Salmonella typhimurium, Shigella boydii, Shigella dysenteriae, Shigella flexneri, Shigella sonnei, Staphylococcus aureus, Staphylococcus epidermidis, Staphylococcus haemolyticus, Streptococcus pneumoniae, Streptococcus mutans, Streptococcus pyogenes, Treponema pallidum, Ureaplasma urealyticum, Vibrio cholerae, Vibrio parahaemolyticus, Vibrio vulnificans, Yersinia enterocolitica, Yersinia pestis and any species falling within the genera of any of the above species.

[0113] 42. The system of Paragraph 37, wherein the target prokaryotic organism is a Gram positive bacterium.

[0114] 43. The system of Paragraph 37, wherein the target prokaryotic organism is selected from the group consisting of Bacillus anthracis, Clostridium acetobutylicum, Clostridium botulinum, Clostridium difficile, Clostridium perfringens, Corynebacterium diptheriae, Enterococcus faecalis, Enterococcus faecium, Listeria monocytogenes, Mycobacterium avium, Mycobacterium bovis, Mycobacterium leprae, Mycobacterium tuberculosis, Nocardia asteroides, Staphylococcus aureus, Staphylococcus epidermidis, Staphylococcus haemolyticus, Streptococcus pneumoniae, Streptococcus mutans, Streptococcus pyogenes and any species falling within the genera of any of the above species.

[0115] 44. The system of Paragraph 37, wherein the target prokaryotic organism is Staphylococcus aureus.

[0116] 45. The system of Paragraph 44, wherein said Staphylococcus aureus is strain Mu50.

[0117] 46. The system of Paragraph 37, wherein the program operations of segregating the consecutive genes into the plurality of bins further comprises identifying monocistronic operons by identifying genes where both the 5′ and 3′ flanking genes are oppositely oriented relative to the selected gene.

[0118] 47. The system of Paragraph 46, wherein the program operations further comprise excluding monocistronic operons from further analysis.

[0119] 48. The system of Paragraph 37, wherein the program operations of segregating the consecutive genes into the plurality of bins further comprises identifying genes having at least one 5′ or 3′ flanking gene in the same orientation.

[0120] 49. The system of Paragraph 48, wherein the program further performs the operation of selectively subjecting putative polycistronic operons to composite operon prediction analysis.

[0121] 50. The system of Paragraph 37, wherein the program operations further comprises evaluating the results from the at least one operon prediction method with respect to gene pair orientation and according to a pre-selected scoring criteria to determine the confidence score value associated with each gene pair.

[0122] 51. The system of Paragraph 37, wherein the program operations of application of the at least one operon prediction method comprises performing an intergenic distance analysis.

[0123] 52. The system of Paragraph 37, wherein the program operations of application of the at least one operon prediction method comprises performing a pairwise assessment of gene conservation.

[0124] 53. The system of Paragraph 52, wherein the program operations of performing the pairwise assessment of gene conservation comprises identifying gene pairs associated with the target organism that are conserved with respect to at least one comparison organism.

[0125] 54. The system of Paragraph 52, wherein the program operations of performing the pairwise assessment of gene conservation further comprises identifying conserved gene pairs associated with the target organism that are adjacent and oriented in the same direction and further possess an adjacent gene pair homolog in at least one comparison organism having a similar orientation.

[0126] 55. The system of Paragraph 54, the program operations of performing the pairwise assessment of gene conservation further comprises ordering the plurality of conserved gene pairs to reflect their relative coordinates with respect to the target prokaryotic organism genome.

[0127] 56. The system of Paragraph 37, wherein the database further stores information describing a plurality of genes relating to at least one other comparison organism and at least one operon prediction method performed by the program comprises an a conservation analysis wherein the program further performs the operations of:
[0128] determining an intergenic distance distribution across a selected number of gene pairs stored in the database for the target organism;
[0129] determining an intergenic distance distribution for genes stored in the database relating to the at least one other comparison organism;
[0130] comparing the intergenic distance distribution across the selected number of gene pairs with that of the comparison organism; and
[0131] associating a conservation value with each gene pair on the basis of identified similarities and differences in intergenic distance distribution between the target organism and the at least one other comparison organism.

[0132] 57. The system of Paragraph 37, wherein the database further stores information describing a plurality of genes relating to at least one other comparison organism and at least one operon prediction method performed by the program comprises a conserved gene cluster analysis wherein the program further performs the operations of:
[0133] (a) identifying target organism gene pairs having an intergenic distance below a selected intergenic distance threshold;
[0134] (b) comparing the sequence and location of identified target organism gene pairs with homologous gene pairs from at least one comparison organism to identify conserved gene pairs between the target organism and the comparison organism;
[0135] (c) repeating steps (a)-(b) for each remaining comparison organism; and
[0136] (d) evaluating the conserved gene pairs between the target organism and each comparison organism with respect to one another to identify conserved gene clusters.

[0137] 58. The system of Paragraph 57, wherein the selected intergenic distance threshold is approximately 300 bp.

[0138] 59. The system of Paragraph 57, wherein the conserved gene cluster analysis further comprises identifying orthologs representative of conserved order between genes in each gene cluster.

[0139] 60. The system of Paragraph 59, wherein orthologs are identified using a BLASTP or BLASTN sequence evaluation application.

[0140] 61. The system of Paragraph 57, wherein the conserved gene cluster analysis further comprises pairwise gene assessment in the target organism relative to homologous gene pairs in at least one comparison organism to identify gene pairs whose sequence and location are conserved across the genomes of the at least one comparison organisms.

[0141] 62. The system of Paragraph 37, wherein the at least one operon prediction method performed by the program comprises a transcriptional terminator analysis wherein the program further performs the operations of:
[0142] extracting a portion of the sequence on both sides of a stop codon associated with each gene from the database;
[0143] evaluating the portion of the sequence on both sides of the stop codon of each gene to identify prospective transcriptional terminators; and
[0144] associating a transcriptional terminator value with each gene pair on the basis of identified prospective transcriptional terminators.

[0145] 63. The system of Paragraph 37, wherein the program further performs the operations of:
[0146] associating a numerical value with the confidence score which reflects the likelihood that the selected genes reside in the some operon, wherein said numerical value is selected from the group consisting of:
[0147] (a) a first numerical value which indicates that the genes of the gene pair are unlikely to be in the same operon if any of the following three criteria are met:
   [0148] (i) the selected genes are in different orientations;
   [0149] (ii) the intergenic distance between the selected genes is greater than approximately 300 bp; or
   [0150] (iii) the intergenic distance between the selected genes is greater than 100 bp and there are no conserved gene clusters;
[0151] (b) a second numerical value which indicates that the selected genes might be in the same operon but the confidence is low if:
   [0152] (i) the selected genes have an intergenic distance greater than approximately 60 bp,
   [0153] (ii) the selected genes are conserved over approximately five or fewer comparison organisms, and
   [0154] (iii) a predicted transcriptional terminator exists between the selected genes;
[0155] (c) a third numerical value which indicates that the selected genes are probably in the same operon if any of the following criteria are met:
   [0156] (i) the selected genes are conserved in at least approximately 10 comparison organisms;
   [0157] (ii) the intergenic distance between the selected genes is approximately less than or equal to 30 bp;
   [0158] or if at least two of the following requirements are met:
   [0159] (i) the intergenic distance between the selected genes is approximately less than or equal to 50 bp;
   [0160] (ii) no predicted transcriptional terminators exist; or
   [0161] (iii) the selected genes are conserved in approximately greater or equal to 5 comparison organisms but less than approximately 10 comparison organisms;
[0162] (d) a fourth numerical value which indicates that the selected genes are likely to reside in the same operon if the genes do not meet any of the above requirements.

[0163] 64. A computer readable medium having stored thereon instructions which cause a general purpose computer to perform the steps of:
[0164] identifying consecutive genes within at least a portion of a target prokaryotic organism's genome;
[0165] determining each gene's orientation in the genome relative to its flanking genes;
[0166] segregating the genes into a plurality of bins on the basis of their orientation such that consecutive genes in the same orientation are grouped into the same bin;
[0167] performing a composite operon prediction analysis comprising pairing each gene within a selected bin with its respective flanking genes and associating a confidence score with each gene pair, wherein the confidence score reflects the likelihood that a selected gene pair resides in the same operon using the criteria of orientation and the application of at least one operon prediction method;
[0168] determining operon boundaries by identifying gene pairs having confidence scores that fall below a selected threshold; and
[0169] associating genes contained between operon boundaries as putative operons.

[0170] 65. The computer readable medium of Paragraph 64, wherein the steps performed by the computer operate on the target prokaryotic organism Bacillus subtilis.

[0171] 66. The computer readable medium of Paragraph 64, wherein the steps performed by the computer operate on the target prokaryotic organism Escherichia coli.

[0172] 67. The computer readable medium of Paragraph 64, wherein the steps performed by the computer operate on a target prokaryotic organism selected from the group consisting of Aquifex aeolicus, Borrelia burgdorferi, Bacillus halodurans, Buchnera species, Clostridium acetobutylicum, Caulobacter crescentus, Campylobacter jejun, Chlamydia pneumoniae, Chlamydia trachomatis, Haemophilus influenzae, Helicobacter pylori, Listeria monocytogenes, Listeria innocua, Lactococcus lactis, Mycoplasma genitalium, Mycobacterium leprae, Mycoplasma pneumoniae, Mycoplasma pulmonis, Mycobacterium tuberculosis, Neisseria meningitides, Pseudomonas aeruginosa, Pasteurella multocida, Rickettsia conorii, Rickettsia prowazekii, Sinorhizobium meliloti, Streptococcus pneumoniae, Streptococcus pyogenes, Salmonella typhi, Salmonella typhimurium, Synechocystis species, Thermotoga maritime, Treponema pallidum, Ureaplasma urealyticum, Vibrio cholerae, Xylella fastidiosa, Yersinia pestis and Enterococcus facaelis.

[0173] 68. The computer readable medium of Paragraph 64, wherein the steps performed by the computer operate on a target prokaryotic organism selected from the group consisting of Acinetobacter baumannii, Anaplasma marginale, Bacillus anthracis, Bacteroides fragilis, Bordetella pertussis, Borrelia burgdorferi, Brucella abortus, Brucella melitensis, Burkholderia cepacia, Burkholderia fungorum, Burkholderia mallei, Campylobacter jejuni, Chlamydia pneumoniae, Chlamydia trachomatis, Clostridium acetobutylicum, Clostridium botulinum, Clostridium difficile, Clostridium perfringens, Corynebacterium diptheriae, Coxiella burnetii, Enterobacter cloacae, Enterococcus faecalis, Enterococcus faecium, Escherichia coli, Francisella tularensis, Haemophilus influenzae, Helicobacter pylori, Klebsiella pneumoniae, Legionella pneumophila, Listeria monocytogenes, Moraxella catarrhalis, Mycobacterium avium, Mycobacterium bovis, Mycobacterium leprae, Mycobacterium tuberculosis, Mycoplasma genitalium, Mycoplasma pneumoniae, Neisseria gonorrhoeae, Neisseria meningitidis, Nocardia asteroides, Pasteurella haemolytica, Pasteurella multocida, Proteus mirabilis, Proteus vulgaris, Pseudomonas aeruginosa, Pseudomonas putida, Pseudomonas syringae, Rickettsia rickettsii, Rochalimaea quintana, Salmonella bongori, Salmonella cholerasuis, Salmonella enterica, Salmonella paratyphi, Salmonella typhi, Salmonella typhimurium, Shigella boydii, Shigella dysenteriae, Shigella flexneri, Shigella sonnei, Staphylococcus aureus, Staphylococcus epidermidis, Staphylococcus haemolyticus, Streptococcus pneumoniae, Streptococcus mutans, Streptococcus pyogenes, Treponema pallidum, Ureaplasma urealyticum, Vibrio cholerae, Vibrio parahaemolyticus, Vibrio vulnificans, Yersinia enterocolitica, Yersinia pestis and any species falling within the genera of any of the above species.

[0174] 69. The computer readable medium of Paragraph 64, wherein the steps performed by the computer operate on a target prokaryotic organism that is a Gram positive bacterium.

[0175] 70. The computer readable medium of Paragraph 64, wherein the steps performed by the computer operate on a target prokaryotic organism selected from the group consisting of Bacillus anthracis, Clostridium acetobutylicum, Clostridium botulinum, Clostridium difficile, Clostridium perfringens, Corynebacterium diptheriae, Enterococcus faecalis, Enterococcus faecium, Listeria monocytogenes, Mycobacterium avium, Mycobacterium bovis, Mycobacterium leprae, Mycobacterium tuberculosis, Nocardia asteroides, Staphylococcus aureus, Staphylococcus epidermidis, Staphylococcus haemolyticus, Streptococcus pneumoniae, Streptococcus mutans, Streptococcus pyogenes and any species falling within the genera of any of the above species.

[0176] 71. The computer readable medium of Paragraph 64, wherein the steps performed by the computer operate on a target prokaryotic organism that is Staphylococcus aureus.

[0177] 72. The computer readable medium of Paragraph 71, wherein said Staphylococcus aureus is strain Mu50.

[0178] 73. The computer readable medium of Paragraph 64, wherein segregation of the genes into the plurality of bins further comprises identifying putative polycistronic operons comprising a gene having at least one 5′ or 3′ flanking gene in the same orientation.

[0179] 74. The computer readable medium of Paragraph 64, wherein the results from the at least one operon prediction method are evaluated with respect to gene pair orientation and according to a pre-selected scoring criteria to determine the confidence score value associated with each gene pair.

[0180] 75. The computer readable medium of Paragraph 64, wherein the at least one operon prediction method comprises a pairwise assessment of gene conservation.

[0181] 76. The computer readable medium of Paragraph 75, wherein the pairwise assessment of gene conservation comprises identifying gene pairs associated with the target organism that are conserved with respect to at least one comparison organism.

[0182] 77. The computer readable medium of Paragraph 75, wherein the pairwise assessment of gene conservation further comprises identifying conserved gene pairs associated with the target organism that are adjacent and oriented in the same direction and further possess an adjacent gene pair homolog in at least one comparison organism having a similar orientation.

[0183] 78. The computer readable medium of Paragraph 64, wherein the at least one operon prediction method comprises a conserved gene cluster analysis.

[0184] 79. The computer readable medium of Paragraph 78, wherein the conserved gene cluster analysis further comprises the steps of:
[0185] (a) identifying gene pairs contained in the bins for the target organism having an intergenic distance below a selected intergenic distance threshold;
[0186] (b) comparing the sequence and location of identified target organism gene pairs with homologous gene pairs from at least one comparison organism to identify conserved gene pairs between the target organism and the comparison organism;
[0187] (c) repeating steps (a)-(b) for each remaining comparison organism; and
[0188] (d) evaluating the conserved gene pairs between the target organism and each comparison organism with respect to one another to identify conserved gene clusters.

[0189] 80. The method of Paragraph 79, wherein the selected intergenic distance threshold is approximately 300 bp.

[0190] 81. The method of Paragraph 79, wherein the conserved gene cluster analysis further comprises pairwise gene assessment in the target organism relative to homologous gene pairs in at least one comparison organism to identify gene pairs whose sequence and location are conserved across the genomes of the at least one comparison organisms.

[0191] 82. The computer readable medium of Paragraph 64, wherein the at least one operon prediction method comprises a transcriptional terminator analysis.

[0192] 83. The computer readable medium of Paragraph 82, wherein the transcriptional terminator analysis further comprises:
[0193] extracting a portion of the sequence on both sides of a stop codon associated with each gene;
[0194] evaluating the portion of the sequence on both sides of the stop codon of each gene to identify prospective transcriptional terminators; and
[0195] associating a transcriptional terminator value with each gene on the basis of identified prospective transcriptional terminators.

[0196] 84. The computer readable medium of Paragraph 83, wherein the portion of the sequence on both sides of the stop codon associated with each gene is evaluated to identify prospective prokaryotic factor-independent transcription terminators.

[0197] 85. The computer readable medium of Paragraph 64, wherein a numerical value is associated with the confidence score and reflects the likelihood of selected genes residing in the same operon, wherein the numerical value is selected from the group consisting of:
[0198] (a) a first numerical value which indicates that the genes of the gene pair are unlikely to be in the same operon if any of the following three criteria are met:
   [0199] (i) the selected genes are in different orientations;
   [0200] (ii) the intergenic distance between the selected genes is greater than approximately 300 bp; or
   [0201] (iii) the intergenic distance between the selected genes is greater than 100 bp and there are no conserved gene clusters;
[0202] (b) a second numerical value which indicates that the selected genes might be in the same operon but the confidence is low if:
   [0203] (i) the selected genes have an intergenic distance greater than approximately 60 bp,
   [0204] (ii) the selected genes are conserved over approximately five or fewer comparison organisms, and
   [0205] (iii) a predicted transcriptional terminator exists between the selected genes;
[0206] (c) a third numerical value which indicates that the selected genes are probably in the same operon if any of the following criteria are met:
   [0207] (i) the selected genes are conserved in at least approximately 10 comparison organisms;
   [0208] (ii) the intergenic distance between the selected genes is approximately less than or equal to 30 bp;
   [0209] or if at least two of the following requirements are met:
   [0210] (i) the intergenic distance between the selected genes is approximately less than or equal to 50 bp;
   [0211] (ii) no predicted transcriptional terminators exist; or
   [0212] (iii) the selected genes are conserved in approximately greater or equal to 5 comparison organisms but less than approximately 10 comparison organisms;
[0213] (d) a fourth numerical value which indicates that the selected genes are likely to reside in the same operon if the genes do not meet any of the above requirements.

[0214] 86. A computer readable medium having stored thereon instructions that cause a general purpose computer to perform operations used to predict operons for a target prokaryotic organism, the operations comprising:
[0215] (a) identifying consecutive genes within at least a portion of the genome of a target organism;
[0216] (b) determining each gene's orientation in the genome relative to its flanking genes;
[0217] (c) segregating consecutive genes in the same orientation into the same bin;
[0218] (d) identifying the intergenic distance between each consecutive gene and its flanking genes;
[0219] (e) identifying orthologous genes in at least one comparison organism that are in the same order and orientation as the corresponding genes in the target organism;
[0220] (f) predicting transcriptional terminators in the sequence flanking the stop codon of each gene;
[0221] (g) predicting the likelihood that two consecutive genes in the same bin are in the same operon by performing at least one of steps (h)-(l) below:
[0222] (h) predicting that two selected consecutive genes in the same bin are unlikely to be in the same operon if any of the following three criteria are met:
   [0223] (i) the two consecutive genes are in different orientations;
   [0224] (ii) the intergenic distance between the two consecutive genes is greater than approximately 300 bp; or
   [0225] (iii) the intergenic distance between the two consecutive genes is greater than 100 bp and there are no conserved gene clusters;
[0226] (i) predicting that two consecutive genes in a multi-gene bin have a low likelihood of being in the same operon if:
   [0227] (i) the two consecutive genes have an intergenic distance greater than approximately 60 bp,
   [0228] (ii) the two consecutive genes are conserved over approximately 5 or fewer comparison organisms, and
   [0229] (iii) a predicted transcriptional terminator exists between the two consecutive genes;
[0230] (j) predicting that two consecutive genes are probably in the same operon if any of the following criteria are met:
   [0231] (i) the two consecutive genes are conserved in at least approximately 10 comparison organisms;
   [0232] (ii) the intergenic distance between the two consecutive genes is approximately less than or equal to 30 bp;
[0233] (k) predicting that two consecutive genes are probably in the same operon if at least two of the following requirements were met:
   [0234] (i) the intergenic distance between the two consecutive genes is approximately less than or equal to 50 bp;
   [0235] (ii) no predicted transcriptional terminators between the two consecutive genes exist; or
   [0236] (iii) the two consecutive genes are conserved in approximately greater than or equal to 5 comparison organisms but less than approximately 10 comparison organisms;
[0237] (l) predicting that two consecutive genes are probably in the same operon if the consecutive genes do not meet any of the above requirements.

[0238] 87. A method of inhibiting the proliferation of a microorganism, said method comprising:
[0239] identifying a gene that is required for proliferation;
[0240] using the method of Paragraph 1 to identify an operon comprising said gene; and
[0241] contacting a microorganism with an antisense nucleic acid complementary to at least a portion of said operon.

[0242] 88. A method for screening a candidate compound for the ability to reduce cellular proliferation, said method comprising the steps of:
[0243] (a) identifying a gene that is required for proliferation;
[0244] (b) using the method of Paragraph 1 to identify an operon comprising said gene;
[0245] (c) sensitizing a cell by providing said cell with a sublethal level of an antisense nucleic acid complementary to at least a portion of said operon;
[0246] (d) contacting said sensitized cell with a compound; and
[0247] (e) determining the degree to which said compound inhibits proliferation of said sensitized cell relative to a nonsensitized cell or a cell which is less sensitive to said compound than said sensitized cell.

[0248] 89. A vector comprising a promoter operably linked to an operon comprising a nucleotide sequence selected from the group consisting of SEQ ID NOs: 1-194.

[0249] 90. The vector of Paragraph 89, wherein said promoter is active in a microorganism selected from the group consisting of Acinetobacter baumannii, Anaplasma marginale, Bacillus anthracis, Bacteroides fragilis, Bordetella pertussis, Borrelia burgdorferi, Brucella abortus, Brucella melitensis, Burkholderia cepacia, Burkholderia fungorum, Burkholderia mallei, Campylobacter jejuni, Chlamydia pneumoniae, Chlamydia trachomatis, Clostridium acetobutylicum, Clostridium botulinum, Clostridium difficile, Clostridium perfringens, Corynebacterium diptheriae, Coxiella burnetii, Enterobacter cloacae, Enterococcus faecalis, Enterococcus faecium, Escherichia coli, Francisella tularensis, Haemophilus influenzae, Helicobacter pylori, Klebsiella pneumoniae, Legionella pneumophila, Listeria monocytogenes, Moraxella catarrhalis, Mycobacterium avium, Mycobacterium bovis, Mycobacterium leprae, Mycobacterium tuberculosis, Mycoplasma genitalium, Mycoplasma pneumoniae, Neisseria gonorrhoeae, Neisseria meningitidis, Nocardia asteroides, Pasteurella haemolytica, Pasteurella multocida, Proteus mirabilis, Proteus vulgaris, Pseudomonas aeruginosa, Pseudomonas putida, Pseudomonas syringae, Rickettsia rickettsii, Rochalimaea quintana, Salmonella bongori, Salmonella cholerasuis, Salmonella enterica, Salmonella paratyphi, Salmonella typhi, Salmonella typhimurium, Shigella boydii, Shigella dysenteriae, Shigella flexneri, Shigella sonnei, Staphylococcus aureus, Staphylococcus epidermidis, Staphylococcus haemolyticus, Streptococcus pneumoniae, Streptococcus mutans, Streptococcus pyogenes, Treponema pallidum, Ureaplasma urealyticum, Vibrio cholerae, Vibrio parahaemolyticus, Vibrio vulnificans, Yersinia enterocolitica, Yersinia pestis and any species falling within the genera of any of the above species.

[0250] 91. The vector of Paragraph 89, wherein said promoter is active in a microorganism selected from the group consisting of Bacillus anthracis, Clostridium acetobutylicum, Clostridium botulinum, Clostridium difficile, Clostridium perfringens, Corynebacterium diptheriae, Enterococcus faecalis, Enterococcus faecium, Listeria monocytogenes, Mycobacterium avium, Mycobacterium bovis, Mycobacterium leprae, Mycobacterium tuberculosis, Nocardia asteroides, Staphylococcus aureus, Staphylococcus epidermidis, Staphylococcus haemolyticus, Streptococcus pneumoniae, Streptococcus mutans, Streptococcus pyogenes and any species falling within the genera of any of the above species.

[0251] 92. The vector of Paragraph 89, wherein said promoter is active in Staphylococcus aureus.

[0252] 93. The vector of Paragraph 92, wherein said Staphylococcus aureus is strain Mu50.

[0253] 94. The vector of Paragraph 89, wherein said promoter is XylT5.

[0254] 95. The vector of Paragraph 89, wherein said operon is operably linked to said promoter in an antisense orientation.

[0255] 96. A vector comprising a promoter operably linked to an operon consisting essentially of a nucleotide sequence selected from the group consisting of SEQ ID NOs: 1-194.

[0256] 97. The vector of Paragraph 96, wherein said operon is operably linked to said promoter in an antisense orientation.

[0257] 98. A host cell comprising a vector which comprises a promoter operably linked to an operon comprising a nucleic acid selected from the group consisting of SEQ ID NOs: 1-194.

[0258] 99. A host cell comprising a vector which comprises a promoter operably linked to an operon consisting essentially of a nucleic acid selected from the group consisting of SEQ ID NOs: 1-194.

[0259] 100. A method for inhibiting the proliferation of a microorganism, said method comprising contacting a cell with an antisense nucleic acid complementary to at least a portion of an operon required for proliferation, wherein said operon comprises a nucleotide sequence selected from the group consisting of SEQ ID NOs: 1-194, and wherein said antisense nucleic acid is not complementary to one or more of SEQ ID NOs: 201-550 or a portion thereof.

[0260] 101. The method of Paragraph 100, wherein said operon comprises at least one gene required for proliferation.

[0261] 102. The method of Paragraph 101, wherein said antisense nucleic acid is complementary to at least a portion of said at least one gene required for proliferation.

[0262] 103. The method of Paragraph 100, wherein said operon comprises at least one gene that is not required for proliferation.

[0263] 104. The method of Paragraph 103, wherein said antisense nucleic acid is complementary to at least a portion of said at least one gene not required for proliferation.

[0264] 105. The method of Paragraph 100, wherein said operon comprises at least one nucleic acid sequence selected from the group consisting of a 5′ untranslated sequence, an intergenic sequence, and a 3′ untranslated sequence.

[0265] 106. The method of Paragraph 105, where said antisense nucleic acid is complementary to at least one nucleic acid sequence selected from the group consisting of a 5′ untranslated sequence, an intergenic sequence, and a 3′ untranslated sequence.

[0266] 107. The method of Paragraph 100, wherein said cell is contacted with said antisense nucleic acid by expressing said antisense nucleic acid from an regulatable promoter.

[0267] 108. The method of Paragraph 100, wherein said cell is contacted with said antisense nucleic acid by expressing said antisense nucleic acid from an inducible promoter.

[0268] 109. The method of Paragraph 100, wherein said cell is contacted with said antisense nucleic acid by expressing said antisense nucleic acid ectopically.

[0269] 110. The method of Paragraph 100, wherein said cell is contacted with said antisense nucleic acid by expressing said antisense nucleic acid from a chromosome of said cell.

[0270] 111. The method of Paragraph 100, wherein said cell is Staphylococcus aureus.

[0271] 112. The method of Paragraph 111, wherein said Staphylococcus aureus is strain Mu50.

[0272] 113. A method for inhibiting the proliferation of a microorganism, said method comprising contacting a cell with an antisense nucleic acid complementary to at least a portion of an operon required for proliferation, wherein said operon comprises at least one gene which has at least 70% nucleotide sequence identity, as determined by BLASTN version 2.0 with default parameters, to a gene contained in an operon comprising a nucleotide sequence selected from the group consisting of SEQ ID NOs: 1-194, and wherein said antisense nucleic acid is not complementary to one or more of SEQ ID NOs: 201-550 or portions thereof.

[0273] 114. The method of Paragraph 113, wherein said operon comprises at least one gene required for proliferation.

[0274] 115. The method of Paragraph 114, wherein said antisense nucleic acid is complementary to at least a portion of said at least one gene required for proliferation.

[0275] 116. The method of Paragraph 113, wherein said operon comprises at least one gene that is not required for proliferation.

[0276] 117. The method of Paragraph 116, wherein said antisense nucleic acid is complementary to at least a portion of said at least one gene not required for proliferation.

[0277] 118. The method of Paragraph 113, wherein said operon comprises at least one nucleic acid sequence selected from the group consisting of a 5′ untranslated sequence, an intergenic sequence, and a 3′ untranslated sequence.

[0278] 119. The method of Paragraph 118, where said antisense nucleic acid is complementary to at least one nucleic acid sequence selected from the group consisting of a 5′ untranslated sequence, an intergenic sequence, and a 3′ untranslated sequence.

[0279] 120. The method of Paragraph 113, wherein said cell is contacted with said antisense nucleic acid by expressing said antisense nucleic acid from an regulatable promoter.

[0280] 121. The method of Paragraph 113, wherein said cell is contacted with said antisense nucleic acid by expressing said antisense nucleic acid from an inducible promoter.

[0281] 122. The method of Paragraph 113, wherein said cell is contacted with said antisense nucleic acid by expressing said antisense nucleic acid ectopically.

[0282] 123. The method of Paragraph 113, wherein said cell is contacted with said antisense nucleic acid by expressing said antisense nucleic acid from a chromosome of said cell.

[0283] 124. The method of Paragraph 113, wherein said cell is selected from the group consisting of Acinetobacter baumannii, Anaplasma marginale, Bacillus anthracis, Bacteroides fragilis, Bordetella pertussis, Borrelia burgdorferi, Brucella abortus, Brucella melitensis, Burkholderia cepacia, Burkholderia fungorum, Burkholderia mallei, Campylobacter jejuni, Chlamydia pneumoniae, Chlamydia trachomatis, Clostridium acetobutylicum, Clostridium botulinum, Clostridium difficile, Clostridium perfringens, Corynebacterium diptheriae, Coxiella burnetii, Enterobacter cloacae, Enterococcus faecalis, Enterococcus faecium, Escherichia coli, Francisella tularensis, Haemophilus influenzae, Helicobacter pylori, Klebsiella pneumoniae, Legionella pneumophila, Listeria monocytogenes, Moraxella catarrhalis, Mycobacterium avium, Mycobacterium bovis, Mycobacterium leprae, Mycobacterium tuberculosis, Mycoplasma genitalium, Mycoplasma pneumoniae, Neisseria gonorrhoeae, Neisseria meningitidis, Nocardia asteroides, Pasteurella haemolytica, Pasteurella multocida, Proteus mirabilis, Proteus vulgaris, Pseudomonas aeruginosa, Pseudomonas putida, Pseudomonas syringae, Rickettsia rickettsii, Rochalimaea quintana, Salmonella bongori, Salmonella cholerasuis, Salmonella enterica, Salmonella paratyphi, Salmonella typhi, Salmonella typhimurium, Shigella boydii, Shigella dysenteriae, Shigella flexneri, Shigella sonnei, Staphylococcus aureus, Staphylococcus epidermidis, Staphylococcus haemolyticus, Streptococcus pneumoniae, Streptococcus mutans, Streptococcus pyogenes, Treponema pallidum, Ureaplasma urealyticum, Vibrio cholerae, Vibrio parahaemolyticus, Vibrio vulnificans, Yersinia enterocolitica, Yersinia pestis and any species falling within the genera of any of the above species.

[0284] 125. The method of Paragraph 113, wherein said cell is a Gram positive bacterium.

[0285] 126. The method of Paragraph 113, wherein said cell is selected from the group consisting of Bacillus anthracis, Clostridium acetobutylicum, Clostridium botulinum, Clostridium difficile, Clostridium perfringens, Corynebacterium diptheriae, Enterococcus faecalis, Enterococcus faecium, Listeria monocytogenes, Mycobacterium avium, Mycobacterium bovis, Mycobacterium leprae, Mycobacterium tuberculosis, Nocardia asteroides, Staphylococcus aureus, Staphylococcus epidermidis, Staphylococcus haemolyticus, Streptococcus pneumoniae, Streptococcus mutans, Streptococcus pyogenes and any species falling within the genera of any of the above species.

[0286] 127. The method of Paragraph 113, wherein said cell is Staphylococcus aureus.

[0287] 128. The method of Paragraph 127, wherein said Staphylococcus aureus is strain Mu50.

[0288] 129. A method for inhibiting the activity or expression of a gene product required for proliferation, said method comprising contacting a cell with an antisense nucleic acid complementary to at least a portion of an operon comprising a gene encoding a gene product required for proliferation wherein said operon comprises a nucleotide sequence selected from the group consisting of SEQ ID NOs: 1-194, and wherein said antisense nucleic acid is not complementary to one or more of SEQ ID NOs: 201-550 or portions thereof.

[0289] 130. The method of Paragraph 129, wherein said gene is selected from the group consisting of SEQ ID NOs: 201-550.

[0290] 131. The method of Paragraph 129, wherein said gene product is selected from the group consisting of SEQ ID NOs: 551-824.

[0291] 132. A method for inhibiting the activity or expression of a gene product required for proliferation, said method comprising contacting a cell with an antisense nucleic acid complementary to at least a portion of an operon comprising a gene which encodes a gene product required for proliferation wherein said gene has at least 70% nucleotide sequence identity, as determined using BLASTN 2.0 with default parameters, to a gene contained in an operon comprising a nucleotide sequence selected from the group consisting of SEQ ID NOs: 1-194, and wherein said antisense nucleic acid is not complementary to one or more of SEQ ID NOs: 201-550 or portions thereof.

[0292] 133. The method of Paragraph 132, wherein said gene is selected from the group consisting of SEQ ID NOs: 201-550.

[0293] 134. The method of Paragraph 132, wherein said gene product is selected from the group consisting of SEQ ID NOs: 551-824.

[0294] 135. A method for inhibiting the activity or expression of a gene product required for proliferation, said method comprising contacting a cell with an antisense nucleic acid complementary to at least a portion of an operon comprising a gene which encodes a gene product required for proliferation wherein said gene product has at least 25% amino acid identity, as determined using FASTA version 3.0t78 with default parameters, to a gene product encoded by a gene contained in an operon selected from the group consisting of SEQ ID NOs: 1-194, and wherein said antisense nucleic acid is not complementary to one or more of SEQ ID NOs: 201-550 or portions thereof.

[0295] 136. The method of Paragraph 135, wherein said gene is selected from the group consisting of SEQ ID NOs: 201-550.

[0296] 137. The method of Paragraph 135, wherein said gene product is selected from the group consisting of SEQ ID NOs: 551-824.

[0297] 138. A method for screening a candidate compound for the ability to reduce cellular proliferation, said method comprising the steps of:
[0298] (a) sensitizing a cell by providing said cell with a sublethal level of an antisense nucleic acid complementary to at least a portion of an operon required for proliferation, wherein said operon comprises a nucleotide sequence selected from the group consisting of SEQ ID NOs: 1-194, and wherein said antisense nucleic acid is not complementary to one or more of SEQ ID NOs: 201-550 or portions thereof;
[0299] (b) contacting said sensitized cell with a compound; and
[0300] (c) determining the degree to which said compound inhibits proliferation of said sensitized cell relative to a nonsensitized cell or a cell which is less sensitive to said compound than said sensitized cell.

[0301] 139. The method of Paragraph 138, wherein said determining step comprises determining whether said compound inhibits the growth of said sensitized cell to a greater extent than said compound inhibits the growth of a nonsensitized cell or a cell which is less sensitive to said compound than said sensitized cell.

[0302] 140. The method of Paragraph 138, wherein said operon comprises at least one gene required for proliferation.

[0303] 141. The method of Paragraph 140, wherein said antisense nucleic acid is complementary to at least a portion of said at least one gene required for proliferation.

[0304] 142. The method of Paragraph 138, wherein said operon comprises at least one gene that is not required for proliferation.

[0305] 143. The method of Paragraph 142, wherein said antisense nucleic acid is complementary to at least a portion of said at least one gene not required for proliferation.

[0306] 144. The method of Paragraph 138, wherein said operon comprises at least one nucleic acid sequence selected from the group consisting of a 5′ untranslated sequence, an intergenic sequence, and a 3′ untranslated sequence.

[0307] 145. The method of Paragraph 144, where said antisense nucleic acid is complementary to at least one nucleic acid sequence selected from the group consisting of a 5′ untranslated sequence, an intergenic sequence, and a 3′ untranslated sequence.

[0308] 146. The method of Paragraph 138, wherein said cell is contacted with said antisense nucleic acid by expressing said antisense nucleic acid from an regulatable promoter.

[0309] 147. The method of Paragraph 138, wherein said cell is contacted with said antisense nucleic acid by expressing said antisense nucleic acid from an inducible promoter.

[0310] 148. The method of Paragraph 138, wherein said cell is contacted with said antisense nucleic acid by expressing said antisense nucleic acid ectopically.

[0311] 149. The method of Paragraph 138, wherein said cell is contacted with said antisense nucleic acid by expressing said antisense nucleic acid from a chromosome of said cell.

[0312] 150. The method of Paragraph 138, wherein said cell is Staphylococcus aureus.

[0313] 151. The method of Paragraph 150, wherein said Staphylococcus aureus is strain Mu50.

[0314] 152. A method for screening a candidate compound for the ability to reduce cellular proliferation, said method comprising the steps of:
[0315] (a) sensitizing a cell by providing said cell with a sublethal level of an antisense nucleic acid complementary to at least a portion of an operon required for proliferation, wherein said operon comprises at least one gene which has at least 70% nucleotide sequence identity, as determined by BLASTN version 2.0 with default parameters, to a gene contained in an operon comprising a nucleotide sequence selected from the group consisting of SEQ ID NOs: 1-194, and wherein said antisense nucleic acid is not complementary to one or more of SEQ ID NOs: 201-550 or portions thereof;
[0316] (b) contacting said sensitized cell with a compound; and
[0317] (c) determining the degree to which said compound inhibits proliferation of said sensitized cell relative to a nonsensitized cell or a cell which is less sensitive to said compound than said sensitized cell.

[0318] 153. The method of Paragraph 152, wherein said determining step comprises determining whether said compound inhibits the growth of said sensitized cell to a greater extent than said compound inhibits the growth of a nonsensitized cell or a cell which is less sensitive to said compound than said sensitized cell.

[0319] 154. The method of Paragraph 152, wherein said operon comprises at least one gene required for proliferation.

[0320] 155. The method of Paragraph 154, wherein said antisense nucleic acid is complementary to at least a portion of said at least one gene required for proliferation.

[0321] 156. The method of Paragraph 152, wherein said operon comprises at least one gene that is not required for proliferation.

[0322] 157. The method of Paragraph 156, wherein said antisense nucleic acid is complementary to at least a portion of said at least one gene not required for proliferation.

[0323] 158. The method of Paragraph 152, wherein said operon comprises at least one nucleic acid sequence selected from the group consisting of a 5′ untranslated sequence, an intergenic sequence, and a 3′ untranslated sequence.

[0324] 159. The method of Paragraph 158, where said antisense nucleic acid is complementary to at least one nucleic acid sequence selected from the group consisting of a 5′ untranslated sequence, an intergenic sequence, and a 3′ untranslated sequence.

[0325] 160. The method of Paragraph 152, wherein said cell is contacted with said antisense nucleic acid by expressing said antisense nucleic acid from an regulatable promoter.

[0326] 161. The method of Paragraph 152, wherein said cell is contacted with said antisense nucleic acid by expressing said antisense nucleic acid from an inducible promoter.

[0327] 162. The method of Paragraph 152, wherein said cell is contacted with said antisense nucleic acid by expressing said antisense nucleic acid ectopically.

[0328] 163. The method of Paragraph 152, wherein said cell is contacted with said antisense nucleic acid by expressing said antisense nucleic acid from a chromosome of said cell.

[0329] 164. The method of Paragraph 152, wherein said cell is selected from the group consisting of Acinetobacter baumannii, Anaplasma marginale, Bacillus anthracis, Bacteroides fragilis, Bordetella pertussis, Borrelia burgdorferi, Brucella abortus, Brucella melitensis, Burkholderia cepacia, Burkholderia fungorum, Burkholderia mallei, Campylobacter jejuni, Chlamydia pneumoniae, Chlamydia trachomatis, Clostridium acetobutylicum, Clostridium botulinum, Clostridium difficile, Clostridium perfringens, Corynebacterium diptheriae, Coxiella burnetii, Enterobacter cloacae, Enterococcus faecalis, Enterococcus faecium, Escherichia coli, Francisella tularensis, Haemophilus influenzae, Helicobacter pylori, Klebsiella pneumoniae, Legionella pneumophila, Listeria monocytogenes, Moraxella catarrhalis, Mycobacterium avium, Mycobacterium bovis, Mycobacterium leprae, Mycobacterium tuberculosis, Mycoplasma genitalium, Mycoplasma pneumoniae, Neisseria gonorrhoeae, Neisseria meningitidis, Nocardia asteroides, Pasteurella haemolytica, Pasteurella multocida, Proteus mirabilis, Proteus vulgaris, Pseudomonas aeruginosa, Pseudomonas putida, Pseudomonas syringae, Rickettsia rickettsii, Rochalimaea quintana, Salmonella bongori, Salmonella cholerasuis, Salmonella enterica, Salmonella paratyphi, Salmonella typhi, Salmonella typhimurium, Shigella boydii, Shigella dysenteriae, Shigella flexneri, Shigella sonnei, Staphylococcus aureus, Staphylococcus epidermidis, Staphylococcus haemolyticus, Streptococcus pneumoniae, Streptococcus mutans, Streptococcus pyogenes, Treponema pallidum, Ureaplasma urealyticum, Vibrio cholerae, Vibrio parahaemolyticus, Vibrio vulnificans, Yersinia enterocolitica, Yersinia pestis and any species falling within the genera of any of the above species.

[0330] 165. The method of Paragraph 152, wherein said cell is a Gram positive bacterium.

[0331] 166. The method of Paragraph 152, wherein said cell is selected from the group consisting of Bacillus anthracis, Clostridium acetobutylicum, Clostridium botulinum, Clostridium difficile, Clostridium perfringens, Corynebacterium diptheriae, Enterococcus faecalis, Enterococcus faecium, Listeria monocytogenes, Mycobacterium avium, Mycobacterium bovis, Mycobacterium leprae, Mycobacterium tuberculosis, Nocardia asteroides, Staphylococcus aureus, Staphylococcus epidermidis, Staphylococcus haemolyticus, Streptococcus pneumoniae, Streptococcus mutans, Streptococcus pyogenes and any species falling within the genera of any of the above species.

[0332] 167. The method of Paragraph 152, wherein said cell is Staphylococcus aureus.

[0333] 168. The method of Paragraph 167, wherein said Staphylococcus aureus is strain Mu50.

[0334] 169. A method for screening a candidate compound for the ability to reduce the activity or expression of a gene product required for proliferation, said method comprising the steps of:
[0335] (a) sensitizing a cell by providing said cell with a sublethal level of an antisense nucleic acid complementary to at least a portion of an operon comprising a gene encoding a gene product required for proliferation wherein said operon comprises a nucleotide sequence selected from the group consisting of SEQ ID NOs: 1-194, and wherein said antisense nucleic acid is not complementary to one or more of SEQ ID NOs: 201-550 or portions thereof;
[0336] (b) contacting said sensitized cell with a compound; and
[0337] (c) determining the degree to which said compound inhibits proliferation of said sensitized cell relative to a nonsensitized cell or a cell which is less sensitive to said compound than said sensitized cell.

[0338] 170. The method of Paragraph 169, wherein said gene is selected from the group consisting of SEQ ID NOs: 201-550.

[0339] 171. The method of Paragraph 169, wherein said gene product is selected from the group consisting of SEQ ID NOs: 551-824.

[0340] 172. A method for screening a candidate compound for the ability to reduce the activity or expression of a gene product required for proliferation, said method comprising the steps of:
[0341] (a) sensitizing a cell by providing said cell with a sublethal level of an antisense nucleic acid complementary to at least a portion of an operon comprising a gene which encodes a gene product required for proliferation wherein said gene has at least 70% nucleotide sequence identity, as determined using BLASTN 2.0 with default parameters, to a gene contained in an operon comprising a nucleotide sequence selected from the group consisting of SEQ ID NOs: 1-194, and wherein said antisense nucleic acid is not complementary to one or more of SEQ ID NOs: 201-550 or portions thereof;
[0342] (b) contacting said sensitized cell with a compound; and
[0343] (c) determining the degree to which said compound inhibits proliferation of said sensitized cell relative to a nonsensitized cell or a cell which is less sensitive to said compound than said sensitized cell.

[0344] 173. The method of Paragraph 172, wherein said gene is selected from the group consisting of SEQ ID NOs: 201-550.

[0345] 174. The method of Paragraph 172, wherein said gene product is selected from the group consisting of SEQ ID NOs: 551-824.

[0346] 175. A method for screening a candidate compound for the ability to reduce the activity or expression of a gene product required for proliferation, said method comprising the steps of:
[0347] (a) sensitizing a cell by providing said cell with a sublethal level of an antisense nucleic acid complementary to at least a portion of an operon comprising a gene which encodes a gene product required for proliferation wherein said gene product has at least 25% amino acid identity, as determined using FASTA version 3.0t78 with default parameters, to a gene product encoded by a gene contained in an operon comprises a nucleotide sequence selected from the group consisting of SEQ ID NOs: 1-194, and wherein said antisense nucleic acid is not complementary to one or more of SEQ ID NOs: 201-550 or portions thereof;
[0348] (b) contacting said sensitized cell with a compound; and
[0349] (c) determining the degree to which said compound inhibits proliferation of said sensitized cell relative to a nonsensitized cell or a cell which is less sensitive to said compound than said sensitized cell.

[0350] 176. The method of Paragraph 175, wherein said gene is selected from the group consisting of SEQ ID NOs: 201-550.

[0351] 177. The method of Paragraph 175, wherein said gene product is selected from the group consisting of SEQ ID NOs: 551-824.

[0352] Other aspects of the present invention relate to methods which include a step of providing an antisense nucleic acid complementary to at least a portion of an operon required for proliferation, wherein said operon comprises at least one gene that is homologous to a gene contained in an operon of SEQ ID NOs: 1-194, and wherein said antisense is not complementary to one or more of the coding sequences, or portions thereof, specified in U.S. patent application Ser. No. 10/282,122, entitled IDENTIFICATION OF ESSENTIAL GENES IN MICROORGANISMS, filed Oct. 25, 2002, the disclosure of which is incorporated herein by reference in its entirety. Examples of such methods are described in paragraphs 113-128, 132-134, 152-168, and 172-174 above as well as elsewhere herein.

[0353] Still other aspects of the present invention relate to methods which include a step of providing an antisense nucleic acid complementary to at least a portion of an operon required for proliferation, wherein said operon comprises at least one gene that encodes a polypeptide that is homologous to a polypeptide contained in an operon of SEQ ID NOs: 1-194, and wherein said antisense is not complementary to one or more of the genes which encode the polypeptides, or portions thereof, specified in U.S. patent application Ser. No. 10/282,122, entitled IDENTIFICATION OF ESSENTIAL GENES IN MICROORGANISMS, filed Oct. 25, 2002, the disclosure of which is incorporated herein by reference in its entirety. Examples of such methods are described in paragraphs 135-137 and 175-177 above as well as elsewhere herein.

### DEFINITIONS

[0354] By “biological pathway” is meant any discrete cell function or process that is carried out by a gene product or a subset of gene products. Biological pathways include anabolic, catabolic, enzymatic, biochemical and metabolic pathways as well as pathways involved in the production of cellular structures such as cell walls. Biological pathways that are usually required for proliferation of cells or microorganisms include, but are not limited to, cell division, DNA synthesis and replication, RNA synthesis (transcription), protein synthesis (translation), protein processing, protein transport, fatty acid biosynthesis, electron transport chains, cell wall synthesis, cell membrane production, synthesis and maintenance, and the like.

[0355] By “inhibit activity of a gene or gene product” is meant having the ability to interfere with the function of a gene or gene product in such a way as to decrease expression of the gene, in such a way as to reduce the level or activity of a product of the gene or in such a way as to inhibit the interaction of the gene or gene product with other biological molecules required for its activity. Agents which inhibit the activity of a gene include agents that inhibit transcription of the gene, agents that inhibit processing of the transcript of the gene, agents that reduce the stability of the transcript of the gene, and agents that inhibit translation of the mRNA transcribed from the gene. In microorganisms, agents which inhibit the activity of a gene can act to decrease expression of the operon in which the gene resides or alter the folding or processing of operon RNA so as to reduce the level or activity of the gene product. The gene product can be a non-translated RNA such as ribosomal RNA, a translated RNA (mRNA) or the protein product resulting from translation of the gene mRNA. Of particular utility to the present invention are antisense RNAs that have activities against the operons or genes to which they specifically hybridze.

[0356] By “activity against a gene product” is meant having the ability to inhibit the function or to reduce the level or activity of the gene product in a cell. This includes, but is not limited to, inhibiting the enzymatic activity of the gene product or the ability of the gene product to interact with other biological molecules required for its activity, including inhibiting the gene product's assembly into a multimeric structure.

[0357] By “activity against a protein” is meant having the ability to inhibit the function or to reduce the level or activity of the protein in a cell. This includes, but is not limited to, inhibiting the enzymatic activity of the protein or the ability of the protein to interact with other biological molecules required for its activity, including inhibiting the protein's assembly into a multimeric structure.

[0358] By “activity against a nucleic acid” is meant having the ability to inhibit the function or to reduce the level or activity of the nucleic acid in a cell. This includes, but is not limited to, inhibiting the ability of the nucleic acid interact with other biological molecules required for its activity, including inhibiting the nucleic acid's assembly into a multimeric structure.

[0359] By “activity against a gene” is meant having the ability to inhibit the function or expression of the gene in a cell. This includes, but is not limited to, inhibiting the ability of the gene to interact with other biological molecules required for its activity.

[0360] By “activity against an operon” is meant having the ability to inhibit the function or reduce the level of one or more products of the operon in a cell. This includes, but is not limited to, inhibiting the enzymatic activity or reducing the level of activity of one or more products of the operon or the ability of one or more products of the operon to interact with other biological molecules required for its activity.

[0361] By “antibiotic” is meant an agent which inhibits the proliferation of a cell or microorganism.

[0362] By “E. coli or Escherichia coli” is meant Escherichia coli or any organism previously categorized as a species of Shigella including Shigella boydii, Shigella flexneri, Shigella dysenteriae, Shigella sonnei, Shigella 2A.

[0363] By “consisting essentially of” is meant including any elements listed after the phrase, and limited to other elements that do not interfere with or contribute to the activity or action specified in the disclosure for the listed elements. Thus, the phrase “consisting essentially of” indicates that the listed elements are required or mandatory, but that other elements are optional and may or may not be present depending upon whether or not they affect the activity or action of the listed elements.

[0364] By “portion of an operon” is meant a fragment which comprises at least 15, at least 16, at least 17, at least 18, at least 19, at least 20, at least 21, at least 22, at least 23, at least 24, at least 25, at least 30, at least 35, at least 40, at least 45, at least 50, at least 55, at least 60, at least 65, at least 70, at least 75, at least 80, at least 85, at least 90, at least 95, at least 100, at least 125, at least 150, at least 175, at least 200, at least 225, at least 250, at least 275, at least 300, at least 325, at least 350, at least 375, at least 400, at least 425, at least 450, at least 475, at least 500, at least 525, at least 550, at least 575, at least 600, at least 650, at least 700, at least 750, at least 800, at least 850, at least 900, at least 950, at least 1000 or more than 1000 consecutive nucleotides of an operon but less than the total number of consecutive nucleotides present in the operon.

[0365] By “gene” is meant a nucleic acid that encodes a polypeptide or nucleic acid which is naturally produced by a cell. Genes also include nucleic acid variants of naturally occurring nucleic acids which encode polypeptides or nucleic acids which have been altered by nucleotide substitution or modification or which have been altered to include additional or fewer nucleotides than the naturally occurring nucleic acid but whose encoded polypeptides or nucleic acids still retain a function similar to those of the naturally occurring nucleic acid. In some contexts, the term gene may be used to refer to both the nucleic acid strand which encodes a polypeptide and the complementary noncoding strand. In other contexts, the term gene may be used to refer to only the nucleic acid which encodes a polypeptide. In such cases, gene is synonymous with the term “coding nucleic acid” or “coding region.”

[0366] By “operon” is meant a nucleic acid that comprises one or more genes that can be transcribed together to produce a single transcript. An operon can also comprise noncoding nucleic acid sequence that is present upstream of the 5′-most gene in the operon including, but not limited to, promoters, operators, regulatory sequences, shine dalgarno sequences and 5′-noncoding sequence. Similarly, an operon can comprise noncoding nucleic acid sequence that is present downstream of the 3′-most gene in the operon including, but not limited to, stop codons, transcriptional terminators and 3′-noncoding sequences.

[0367] By “homologous nucleic acid” is meant a nucleic acid that has at least 99%, at least 98%, at least 97%, at least 96% at least 95%, at least 94%, at least 93%, at least 92%, at least 91%, at least 90%, at least 85%, at least 80%, at least 75% or at least 70% nucleotide sequence identity to a another nucleic acid. The term “homologous nucleic acid” also includes nucleic acids which hybridize under stringent conditions to another nucleic acid. As used herein, “stringent conditions” means hybridization to filter-bound nucleic acid in 6×SSC at about 45° C. followed by one or more washes in 0.1×SSC/0.2% SDS at about 68° C. Other exemplary stringent conditions may refer, e.g., to washing in 6×SSC/0.05% sodium pyrophosphate at 37° C., 48° C., 55° C., and 60° C. as appropriate for the particular probe being used. The term “homologous nucleic acid” also includes nucleic acids which hybridize under moderate conditions to another nucleic acid. As used herein, “moderate conditions” means hybridization to filter-bound DNA in 6× sodium chloride/sodium citrate (SSC) at about 45° C. followed by one or more washes in 0.2×SSC/0.1% SDS at about 42-65° C.

[0368] By “homologous sense nucleic acid” is meant a nucleic acid that has at least 99%, at least 98%, at least 97%, at least 96% at least 95%, at least 94%, at least 93%, at least 92%, at least 91%, at least 90%, at least 85%, at least 80%, at least 75% or at least 70% nucleotide sequence identity to an operon comprising a nucleotide sequence selected from the group consisting of SEQ ID NOs: 1-194 or a portion thereof. A portion of an operon comprising a nucleotide sequence selected from the group consisting of SEQ ID NOs: 1-194 can comprise a coding region, a noncoding region, or a nucleotide sequence which includes all or portions of both coding and noncoding regions of an operon comprising a nucleotide sequence selected from the group consisting of SEQ ID NOs: 1-194. Additionally, a portion of an operon comprising a nucleotide sequence selected from the group consisting of SEQ ID NOs: 1-194 includes fragments comprising at least 15, at least 16, at least 17, at least 18, at least 19, at least 20, at least 21, at least 22, at least 23, at least 24, at least 25, at least 30, at least 35, least 40, at least 45, at least 50, at least 55, at least 60, at least 65, at least 70, at least 75, at least 80, at least 85, at least 90, at least 95, at least 100, at least 125, at least 150, at least 175, at least 200, at least 225, at least 250, at least 275, at least 300, at least 325, at least 350, at least 375, at least 400, at least 425, at least 450, at least 475, at least 500, at least 525, at least 550, at least 575, at least 600, at least 650, at least 700, at least 750, at least 800, at least 850, at least 900, at least 950, at least 1000 or more than 1000 consecutive nucleotides of a operon comprising a nucleotide sequence selected from the group consisting of SEQ ID NOs: 1-194 but less than the total number of consecutive nucleotides present in the operon. Nucleic acid identity can be measured using BLASTN version 2.0 with the default parameters or tBLASTX with the default parameters. (Altschul, S. F. et al. Gapped BLAST and PSI-BLAST: A New Generation of Protein Database Search Programs, Nucleic Acid Res. 25: 3389-3402 (1997), the disclosure of which is incorporated herein by reference in its entirety).

[0369] The term “homologous sense nucleic acid” also includes nucleic acids which hybridize under stringent conditions to a nucleic acid that is complementary to another sense nucleic acid. In some embodiments, a homologous nucleic acid comprises a nucleic acid which hybridizes under stringent conditions to a nucleic acid that is complementary to one of the operons comprising a nucleotide sequence selected from the group consisting of SEQ ID NOs: 1-194 or a portion thereof. A portion of a nucleotide sequence complementary to an operon comprising a nucleotide sequence selected from the group consisting of SEQ ID NOs: 1-194 can comprise the complement of a coding region, a complement of a noncoding region, or a complement of a combination of coding and noncoding regions of an operon comprising a nucleotide sequence selected from the group consisting of SEQ ID NOs: 1-194. Additionally, a portion of a nucleotide sequence complementary to an operon comprising a nucleotide sequence selected from the group consisting of SEQ ID NOs: 1-194 includes fragments comprising at least 15, at least 16, at least 17, at least 18, at least 19, at least 20, at least 21, at least 22, at least 23, at least 24, at least 25, at least 30, at least 35, at least 40, least 45, at least 50, at least 55, at least 60, at least 65, at least 70, at least 75, at least 80, at least 85, at least 90, at least 95, at least 100, at least 125, at least 150, at least 175, at least 200, at least 225, at least 250, at least 275, at least 300, at least 325, at least 350, at least 375, at least 400, at least 425, at least 450, at least 475, at least 500, at least 525, at least 550, at least 575, at least 600, at least 650, at least 700, at least 750, at least 800, at least 850, at least 900, at least 950, at least 1000 or more than 1000 consecutive nucleotides of a complement of an operon comprising a nucleotide sequence selected from the group consisting of SEQ ID NOs: 1-194 but less than the total number of consecutive nucleotides present in the complement of the operon. As used herein, “stringent conditions” means hybridization to filter-bound nucleic acid in 6×SSC at about 45° C. followed by one or more washes in 0.1×SSC/0.2% SDS at about 68° C. Other exemplary stringent conditions may refer, e.g., to washing in 6×SSC/0.05% sodium pyrophosphate at 37° C., 48° C., 55° C., and 60° C. as appropriate for the particular probe being used.

[0370] The term “homologous sense nucleic acid” also includes nucleic acids which hybridize under moderate conditions to a nucleic acid that is complementary to another nucleic acid. In some embodiments, a homologous nucleic acid comprises a nucleic acid which hybridizes under moderate conditions to a nucleic acid that is complementary to one of the operons comprising a nucleotide sequence selected from the group consisting of SEQ ID NOs: 1-194 or a portion thereof. A portion of a nucleotide sequence complementary to an operon comprising a nucleotide sequence selected from the group consisting of SEQ ID NOs: 1-194 can comprise the complement of a coding region, a complement of a noncoding region, or a complement of a combination of coding and noncoding regions of an operon comprising a nucleotide sequence selected from the group consisting of SEQ ID NOs: 1-194. Additionally, a portion of a nucleotide sequence complementary to an operon comprising a nucleotide sequence selected from the group consisting of SEQ ID NOs: 1-194 includes fragments comprising at least 15, at least 16, at least 17, at least 18, at least 19, at least 20, at least 21, at least 22, at least 23, at least 24, at least 25, at least 30, at least 35, at least 40, at least 45, at least 50, at least 55, at least 60, at least 65, at least 70, at least 75, at least 80, at least 85, at least 90, at least 95, at least 100, at least 125, at least 150, at least 175, at least 200, at least 225, at least 250, at least 275, at least 300, at least 325, at least 350, at least 375, at least 400, at least 425, at least 450, at least 475, at least 500, at least 525, at least 550, at least 575, at least 600, at least 650, at least 700, at least 750, at least 800, at least 850, at least 900, at least 950, at least 1000 or more than 1000 consecutive nucleotides of a complement of an operon comprising a nucleotide sequence selected from the group consisting of SEQ ID NOs: 1-194 but less than the total number of consecutive nucleotides present in the complement of the operon. As used herein, “moderate conditions” means hybridization to filter-bound DNA in 6× sodium chloride/sodium citrate (SSC) at about 45° C. followed by one or more washes in 0.2×SSC/0.1% SDS at about 42-65° C.

[0371] The term “homologous sense nucleic acid” also includes a nucleic acid comprising a nucleotide sequence which encodes a gene product whose activity is complemented by one of the gene products encoded by a gene contained in an operon comprising a nucleotide sequence selected from the group consisting of any of SEQ ID NOs: 1-194.

[0372] As used herein, a “homologous coding nucleic acid” is a nucleic acid that is homologous to a coding region contained within an operon. In some embodiments, a homologous coding nucleic acid can be identified by membership of the coding region of interest to a functional orthologue cluster. All other members of that orthologue cluster are considered homologues. Such a library of functional orthologue clusters can be found on the internet by entering the following quoted text, “www.ncbi.nlm.nih.”, in the address bar of a web browser, such as Internet Explorer or Netscape, followed immediately by “gov/COG”. A coding region, such as an open reading frame in a gene, can be classified into a cluster of orthologous groups or COG by using the COGNITOR program available at the above web site, or by direct BLASTP comparison of the gene of interest to the members of the COGs and analysis of these results as described by Tatusov, R. L., Galperin, M. Y., Natale, D. A. and Koonin, E. V. (2000) The COG database: a tool for genome-scale analysis of protein functions and evolution. Nucleic Acids Research v. 28 n. 1, pp33-36, the disclosure of which is incorporated herein by reference in its entirety.

[0373] Homologous coding nucleic acids and the homologous polypeptides which they encode may also be identified using a “reciprocal” best-hit analysis. For example, to facilitate the identification of homologous coding nucleic acids and homologous polypeptides, paralogous genes within each of 51 pathogenic bacteria are identified and clustered prior to comparison to other organisms. Briefly, the polypeptide sequence of each polypeptide encoded by each gene in a given organism is compared to the polypeptide sequence encoded by every other gene for that organism for each of the 51 pathogenic bacteria (PathoSeq Sept 2001 release) using BLASTP 2.09 algorithm without filtering. Simultaneously, the polypeptide sequence encoded by each gene of an organism is compared to the polypeptide sequences encoded by each of the genes in the remaining 51 organisms. Those polypeptides within a single organism that share a higher degree of sequence identity to one another than to polypeptide sequences obtained from any other organisms are clustered as “paralog” sequences for “reciprocal” best-hit analysis.

[0374] For each reference organism, the 50 homologous coding nucleic acids (and the 50 homologous polypeptides which they encode) can be determined by identifying the genes in each of the 50 comparison organisms which encode a polypeptide sharing the highest degree of amino acid sequence identity to the polypeptide encoded by the gene from the reference organism. The accuracy of the identification of the predicted homologous coding nucleic acids (and the homologous polypeptides which they encode) is confirmed by a “reciprocal” BLAST analysis in which the polypeptide sequence of the predicted homologous polypeptide is compared against the polypeptides encoded by each of the genes in the reference organism using BLASTP 2.09 algorithm without filtering. Only those polypeptides that share the highest degree of amino acid sequence identity in each portion of the two-way comparison are retained for further analysis.

[0375] The term “homologous coding nucleic acid” also includes nucleic acids comprising nucleotide sequences which encode polypeptides having at least 99%, at least 98%, at least 97%, at least 96%, at least 95%, at least 94%, at least 93%, at least 92%, at least 91%, at least 90%, at least 85%, at least 80%, at least 75%, at least 70%, at least 60%, at least 50%, at least 40%, at least 30% or at least 25% amino acid identity or similarity to another polypeptide. In some embodiments, a “homologous coding nucleic acid” includes nucleic acids comprising nucleotide sequences which encode polypeptides having at least 99%, at least 98%, at least 97%, at least 96%, at least 95%, at least 94%, at least 93%, at least 92%, at least 91%, at least 90%, at least 85%, at least 80%, at least 75%, at least 70%, at least 60%, at least 50%, at least 40%, at least 30% or at least 25% amino acid identity or similarity to a polypeptide encoded by a gene that is contained in any of the operons comprising a nucleotide sequence selected from the group consisting of SEQ ID NOs: 1-194. In other embodiments, a “homologous coding nucleic acid” includes nucleic acids comprising nucleotide sequences which encode polypeptides having at least 99%, at least 98%, at least 97%, at least 96%, at least 95%, at least 94%, at least 93%, at least 92%, at least 91%, at least 90%, at least 85%, at least 80%, at least 75%, at least 70%, at least 60%, at least 50%, at least 40%, at least 30% or at least 25% amino acid identity or similarity to a polypeptide encoded by a portion of a gene that is contained in any of the operons comprising a nucleotide sequence selected from the group consisting of SEQ ID NOs: 1-194. A portion of a gene that is contained in any of the operons comprising a nucleotide sequence selected from the group consisting of SEQ ID NOs: 1-194 comprises consecutive nucleotides which encode at least 10, at least 15, at least 20, at least 25, at least 30, at least 35, at least 40, at least 45, at least 50, at least 55, at least 60, at least 65, at least 70, at least 75, at least 80, at least 85, at least 90, at least 95, at least 100, at least 110, at least 120, at least 130, at least 140, at least 150 or more than 150 consecutive amino acids. In some embodiments, protein identity or similarity is determined using the FASTA version 3.0t78 algorithm with the default parameters. As an alternative, protein identity or similarity may be identified using BLASTP with the default parameters, BLASTX with the default parameters, TBLASTN with the default parameters, or tBLASTX with the default parameters. (Altschul, S. F. et al. Gapped BLAST and PSI-BLAST: A New Generation of Protein Database Search Programs, Nucleic Acid Res. 25: 3389-3402 (1997), the disclosure of which is incorporated herein by reference in its entirety).

[0376] Homologous coding nucleic acids and the homologous polypeptides which they encode may also be identified using a “reciprocal” best-hit analysis. To facilitate the identification of homologous coding nucleic acids and homologous polypeptides, paralogous genes within each of 51 organisms are identified and clustered prior to comparison to other organisms. Briefly, the polypeptide sequence of each polypeptide encoded by each gene in a given organism is compared to the polypeptide sequence encoded by every other gene for that organism for each of the 51 pathogenic bacteria (PathoSeq September 2001 release) using BLASTP 2.09 algorithm without filtering. Simultaneously, the polypeptide sequence encoded by each gene of an organism is compared to the polypeptide sequences encoded by each of the genes in the remaining 51 organisms. Those polypeptides within a single organism that share a higher degree of sequence identity to one another than to polypeptide sequences obtained from any other organisms are clustered as “paralog” sequences for “reciprocal” best-hit analysis.

[0377] For each reference organism, the 50 homologous coding nucleic acids (and the 50 homologous polypeptides which they encode) can be determined by identifying the genes in each of the 50 comparison organisms which encode a polypeptide sharing the highest degree of amino acid sequence identity to the polypeptide encoded by the gene from the reference organism. The accuracy of the identification of the predicted homologous coding nucleic acids (and the homologous polypeptides which they encode) is confirmed by a “reciprocal” BLAST analysis in which the polypeptide sequence of the predicted homologous polypeptide is compared against the polypeptides encoded by each of the genes in the reference organism using BLASTP 2.09 algorithm without filtering. Only those polypeptides that share the highest degree of amino acid sequence identity in each portion of the two-way comparison are retained for further analysis.

[0378] It will be appreciated that other methods that are known in the art can also be used to identify homologous coding nucleic acids.

[0379] The term “homologous antisense nucleic acid” includes nucleic acids comprising a nucleotide sequence having at least 99%, at least 98%, at least 97%, at least 96% at least 95%, at least 94%, at least 93%, at least 92%, at least 91%, at least 90%, at least 85%, at least 80%, at least 75% or at least 70% nucleotide sequence identity to a nucleotide sequence complementary to an operon comprising a nucleotide sequence selected from the group consisting of SEQ ID NOs: 1-194 or a portion thereof but which is not complementary to one or more of SEQ ID NOs: 201-550 or portions thereof. A portion of a nucleotide sequence complementary to an operon comprising a nucleotide sequence selected from the group consisting of SEQ ID NOs: 1-194 can comprise the complement of a coding region, a complement of a noncoding region, or a complement of a combination of coding and noncoding regions of an operon comprising a nucleotide sequence selected from the group consisting of SEQ ID NOs: 1-194. Additionally, a portion of a nucleotide sequence complementary to an operon comprising a nucleotide sequence selected from the group consisting of SEQ ID NOs: 1-194 includes fragments comprising at least 15, at least 16, at least 17, at least 18, at least 19, at least 20, at least 21, at least 22, at least 23, at least 24, at least 25, at least 30, at least 35, at least 40, at least 45, at least 50, at least 55, at least 60, at least 65, at least 70, at least 75, at least 80, at least 85, at least 90, at least 95, at least 100, at least 125, at least 150, at least 175, at least 200, at least 225, at least 250, at least 275, at least 300, at least 325, at least 350, at least 375, at least 400, at least 425, at least 450, at least 475, at least 500, at least 525, at least 550, at least 575, at least 600, at least 650, at least 700, at least 750, at least 800, at least 850, at least 900, at least 950, at least 1000 or more than 1000 consecutive nucleotides of an operon comprising a nucleotide sequence selected from the group consisting of SEQ IN NOs: 1-194 but less than the total number of consecutive nucleotides present in the operon. Nucleic acid identity can be measured using BLASTN version 2.0 with the default parameters or tBLASTX with the default parameters. (Altschul, S. F. et al. Gapped BLAST and PSI-BLAST: A New Generation of Protein Database Search Programs, Nucleic Acid Res. 25: 3389-3402 (1997), the disclosure of which is incorporated herein by reference in its entirety).

[0380] The term “homologous antisense nucleic acid” also includes nucleic acids which hybridize under stringent conditions to any one of the operons comprising a nucleotide sequence selected from the group consisting of SEQ ID NOs: 1-194 or a portion thereof but which are not complementary to one or more of SEQ ID NOs: 201-550 or portions thereof. A portion of an operon comprising a nucleotide sequence selected from the group consisting of SEQ ID NOs: 1-194 can comprise a coding region, a noncoding region, or a combination of coding and noncoding regions of an operon comprising a nucleotide sequence selected from the group consisting of SEQ ID NOs: 1-194. Additionally, a portion of an operon comprising a nucleotide sequence selected from the group consisting of SEQ ID NOs: 1-194 includes fragments comprising at least 15, at least 16, at least 17, at least 18, at least 19, at least 20, at least 21, at least 22, at least 23, at least 24, at least 25, at least 30, at least 35, at least 40, at least 45, at least 50, at least 55, at least 60, at least 65, at least 70, at least 75, at least 80, at least 85, at least 90, least 95, at least 100, at least 125, at least 150, at least 175, at least 200, at least 225, at least 250, at least 275, at least 300, at least 325, at least 350, at least 375, at least 400, at least 425, at least 450, at least 475, at least 500, at least 525, at least 550, at least 575, at least 600, at least 650, at least 700, at least 750, at least 800, at least 850, at least 900, at least 950, at least 1000 or more than 1000 consecutive nucleotides of an operon comprising a nucleotide sequence selected from the group consisting of SEQ ID NOs: 1-194 but less than the total number of consecutive nucleotides present in the operon. As used herein, “stringent conditions” means hybridization to filter-bound nucleic acid in 6×SSC at about 45° C. followed by one or more washes in 0.1×SSC/0.2% SDS at about 68° C. Other exemplary stringent conditions may refer, e.g., to washing in 6×SSC/0.05% sodium pyrophosphate at 37° C., 48° C., 55° C. and 60° C. as appropriate for the particular probe being used.

[0381] The term “homologous antisense nucleic acid” also includes nucleic acids which hybridize under moderate conditions to any one of the operons comprising a nucleotide sequence selected from the group consisting of SEQ ID NOs: 1-194 or a portion thereof but which are not complementary one or more of SEQ ID NOs: 201-550 or portions thereof. A portion of an operon comprising a nucleotide sequence selected from the group consisting of SEQ ID NOs: 1-194 can comprise the a coding region, a noncoding region, or a combination of coding and noncoding regions of an operon comprising a nucleotide sequence selected from the group consisting of SEQ ID NOs: 1-194. Additionally, a portion of an operon comprising a nucleotide sequence selected from the group consisting of SEQ ID NOs: 1-194 includes fragments comprising at least 15, at least 16, at least 17, at least 18, at least 19, at least 20, at least 21, at least 22, at least 23, at least 24, at least 25, at least 30, at least 35, at least 40, at least 45, at least 50, at least 55, at least 60, at least 65, at least 70, at least 75, at least 80, at least 85, at least 90, at least 95, at least 100, at least 125, at least 150, at least 175, at least 200, at least 225, at least 250, at least 275, at least 300, at least 325, at least 350, at least 375, at least 400, at least 425, at least 450, at least 475, at least 500, at least 525, at least 550, at least 575, at least 600, at least 650, at least 700, at least 750, at least 800, at least 850, at least 900, at least 950, at least 1000 or more than 1000 consecutive nucleotides of an operon comprising a nucleotide sequence selected from the group consisting of SEQ ID NOs: 1-194 but less than the total number of consecutive nucleotides present in the operon. As used herein, “moderate conditions” means hybridization to filter-bound DNA in 6× sodium chloride/sodium citrate (SSC) at about 45° C. followed by one or more washes in 0.2×SSC/0.1% SDS at about 42-65° C.

[0382] The term “homologous polypeptide” includes polypeptides having at least 99%, at least 98%, at least 97%, at least 96%, at least 95%, at least 94%, at least 93%, at least 92%, at least 91%, at least 90%, at least 85%, at least 80%, at least 75%, at least 70%, at least 60%, at least 50%, at least 40%, at least 30% or at least 25% amino acid identity or similarity to another polypeptide. In some embodiments, a homologous polpypeptide has at least 99%, at least 98%, at least 97%, at least 96%, at least 95%, at least 94%, at least 93%, at least 92%, at least 91%, at least 90%, at least 85%, at least 80%, at least 75%, at least 70%, at least 60%, at least 50%, at least 40%, at least 30% or at least 25% amino acid identity to a polypeptide that is encoded by a gene contained in an operon comprising a nucleotide sequence selected from the group consisting of SEQ ID NOs: 1-194 or a portion thereof. A portion of a polypeptide encoded by a gene contained in an operon comprising a nucleotide sequence selected from the group consisting of SEQ ID NOs: 1-194 can comprise at least 5, at least 6, at least 7, at least 8, at least 9, at least 10, at least 11, at least 12, at least 13, at least 14, at least 15, at least 16, at least 17, at least 18, at least 19, at least 20, at least 25, at least 30, at least 35, at least 40, at least 45, at least 50, at least 60, at least 70, at least 80, at least 90, at least 100, at least 110, at least 120, at least 130, at least 140, at least 150, at least 160, at least 170, at least 180, at least 190, at least 200, at least 225, at least 250 or more than 250 consecutive amino acids of a polypeptide encoded by a gene contained in an operon comprising a nucleotide sequence selected from the group consisting of SEQ ID NOs: 1-194 but less than the total number of amino acids present in the polypeptide. Identity or similarity may be determined using the FASTA version 3.0t78 algorithm with the default parameters. Alternatively, protein identity or similarity may be identified using BLASTP with the default parameters, BLASTX with the default parameters, or TBLASTN with the default parameters. (Altschul, S. F. et al. Gapped BLAST and PSI-BLAST: A New Generation of Protein Database Search Programs, Nucleic Acid Res. 25: 3389-3402 (1997), the disclosure of which is incorporated herein by reference in its entirety).

[0383] In some embodiments of the present invention, nucleic acids that hybridize to any one of the nucleic acids comprising a nucleotide sequence selected from the group consisting of SEQ ID NOs.: 1-194 or complements thereof are utilized. Such hybridization may be under stringent or moderate conditions as defined above or under other conditions which permit hybridization. The nucleic acid molecules utilized in the present invention that hybridize to these DNA sequences include oligodeoxynucleotides (“oligos”) which hybridize to the target gene under highly stringent or stringent conditions. In general, for oligos between 14 and 70 nucleotides in length the melting temperature (Tm) is calculated using the formula:
Tm(° C.)=81.5+16.6(log[monovalent cations(molar)]+0.41(% G+C)−(500/N)
where N is the length of the probe. If the hybridization is carried out in a solution containing formamide, the melting temperature may be calculated using the equation:
Tm(° C.)=81.5 +16.6(log[monovalent cations(molar)]+0.41(% G+C)−(0.61) (% formamide)−(500/N)
where N is the length of the probe. In general, hybridization is carried out at about 20-25 degrees below Tm (for DNA-DNA hybrids) or about 10-15 degrees below Tm (for RNA-DNA hybrids).

[0386] Other hybridization conditions are apparent to those of skill in the art (see, for example, Ausubel, F. M. et al., eds., 1989, Current Protocols in Molecular Biology, Vol. I, Green Publishing Associates, Inc. and John Wiley & Sons, Inc., New York, at pp. 6.3.1-6.3.6 and 2.10.3, the disclosure of which is incorporated herein by reference in its entirety).

[0387] The term, Salmonella, is the generic name for a large group of gram negative enteric bacteria that are closely related to Escherichia coli. The diseases caused by Salmonella are often due to contamination of foodstuffs or the water supply and affect millions of people each year. Traditional methods of Salmonella taxonomy were based on assigning a separate species name to each serologically distinguishable strain (Kauffmann, F 1966 The bacteriology of the Enterobacteriaceae. Munksgaard, Copenhagen). Serology of Salmonella is based on surface antigens (O [somatic] and H [flagellar]). Over 2,400 serotypes or serovars of Salmonella are known (Popoff, et al. 2000 Res. Microbiol. 151:63-65). Therefore, each serotype was considered to be a separate species and often given names, accordingly (e.g. S. paratyphi, S. typhimurium, S. typhi, S. enteriditis, etc.).

[0388] However, by the 1970s and 1980s it was recognized that this system was not only cumbersome, but also inaccurate. Then, many Salmonella species were lumped into a single species (all serotypes and subgenera I, II, and IV and all serotypes of Arizona) with a second subspecies, S. bongorii also recognized (Crosa, et al., 1973, J. Bacteriol. 115:307-315). Though species designations are based on the highly variable surface antigens, the Salmonella are very similar otherwise with a major exception being pathogenicity determinants.

[0389] There has been some debate on the correct name for the Salmonella species. Currently (Brenner, et al. 2000 J. Clin. Microbiol. 38:2465-2467), the accepted name is Salmonella enterica. S. enterica is divided into six subspecies (I, S. enterica subsp. enterica; II, S. enterica, subsp. salamae; IIIa, S. enterica subsp. arizonàe; IIIb, S. enterica subsp. diarizonae; IV, S. enterica subsp. houtenae; and VI, S. enterica subsp. indica). Within subspecies I, serotypes are used to distinguish each of the serotypes or serovars (e.g. S. enterica serotype Enteriditis, S. enterica serotype Typhimurium, S. enterica serotype Typhi, and S. enterica serotype Choleraesuis, etc.). Current convention is to spell this out on first usage (Salmonella enterica ser. Typhimurium) and then use an abbreviated form (Salmonella Typhimurium or S. Typhimurium). Note, the genus and species names (Salmonella enterica) are italicized but not the serotype/serovar name (Typhimurium). Because the taxonomic committees have yet to officially approve of the actual species name, this latter system is what is employed by the CDC (Brenner, et al. 2000 J. Clin. Microbiol. 38:2465-2467). Due to the concerns of both taxonomic priority and medical importance, some of these serotypes might ultimately receive full species designations (S. typhi would be the most notable).

[0390] Therefore, as used herein “Salmonella enterica or S. enterica” includes serovars Typhi, Typhimurium, Paratyphi, Choleraesuis, etc.” However, appeals of the “official” name are in process and the taxonomic designations may change (S. choleraesuis is the species name that could replace S. enterica based solely on priority).

[0391] By “identifying a compound” is meant to screen one or more compounds in a collection of compounds such as a combinatorial chemical library or other library of chemical compounds or to characterize a single compound by testing the compound in a given assay and determining whether it exhibits the desired activity.

[0392] By “inducer” is meant an agent or solution which, when placed in contact with a cell or microorganism, increases transcription, or inhibitor and/or promoter clearance/fidelity, from a desired promoter.

[0393] As used herein, “nucleic acid” means DNA, RNA, or modified nucleic acids. Thus, the terminology “the nucleic acid of SEQ ID NO: X” or “the nucleic acid comprising the nucleotide sequence” includes both the DNA sequence of SEQ ID NO: X and an RNA sequence in which the thymidines in the DNA sequence have been substituted with uridines in the RNA sequence and in which the deoxyribose backbone of the DNA sequence has been substituted with a ribose backbone in the RNA sequence. Modified nucleic acids are nucleic acids having nucleotides or structures which do not occur in nature, such as nucleic acids in which the internucleotide phosphate residues have been replaced with methylphosphonates, phosphorothioates, phosphoramidates, and phosphate esters. Nonphosphate internucleotide analogs such as siloxane bridges, carbonate brides, thioester bridges, as well as many others known in the art may also be used in modified nucleic acids. Modified nucleic acids may also comprise, α-anomeric nucleotide units and modified nucleotides such as 1,2-dideoxy-d-ribofuranose, 1,2-dideoxy-1-phenylribofuranose, and N⁴,N⁴-ethano-5-methyl-cytosine are contemplated for use in the present invention. Modified nucleic acids may also be peptide nucleic acids in which the entire deoxyribose-phosphate backbone has been exchanged with a chemically completely different, but structurally homologous, polyamide (peptide) backbone containing 2-aminoethyl glycine units.

[0394] As used herein, “sensitized cell” means a cell which has been exposed to a product or process which produces a sub-lethal effect.

[0395] As used herein, “sub-lethal” means a concentration of an agent below the concentration required to inhibit all cell growth.

[0396] The complete genome sequence for numerous strains of Staphylococcus aureus is publicly available. For example, the sequence of the complete genome of Staphylcoccus aureus strain Mu50 is deposited in Genbank under accession number BA000017; the sequence of the complete genome of Staphylcoccus aureus strain N315 is deposited in Genbank under accession number BA000018 and the sequence of the complete genome of Staphylcoccus aureus strain MW2 is deposited in Genbank under accession number BA000033. Each of the above-identified genomic sequences is incorporated herein by reference in their entireties.

### BRIEF DESCRIPTION OF THE DRAWINGS

[0397] FIG. 1 illustrates an exemplary consensus model for operon identification.

[0398] FIG. 2 illustrates a computation pipeline 200 for operon prediction.

[0399] FIG. 3A illustrates a method for distance threshold selection.

[0400] FIG. 3B illustrates the method of distance threshold selection of FIG. 3A for an exemplary target organism, Staphylococcus aureus compared to a plurality of other reference organisms.

[0401] FIG. 4 illustrates a method for conserved gene cluster analysis that may be used in operon identification.

[0402] FIG. 5A illustrates a method for boundary analysis comprising a transcriptional terminator identification approach.

[0403] FIG. 5B illustrates a relative distribution of transcription terminators predicted according to the transcriptional terminator identification approach of FIG. 5A.

[0404] FIG. 6 illustrates a method for gene pair scoring wherein a numerical score is used to represent the degree of confidence that the genes of a gene pair reside in the same operon.

[0405] FIG. 7 is an IPTG dose response curve in E. coli transformed with an IPTG-inducible plasmid containing either an antisense clone to the E. coli ribosomal protein rplW (AS-rplW) which is required for protein synthesis and essential for cell proliferation, or an antisense clone to the elaD (AS-elaD) gene which is not known to be involved in protein synthesis and which is also essential for proliferation.

[0406] FIG. 8A is a tetracycline dose response curve in E. coli transformed with an IPTG-inducible plasmid containing antisense to rplW (AS-rplW) in the absence (0) or presence of IPTG at concentrations that result in 20% and 50% growth inhibition.

[0407] FIG. 8B is a tetracycline dose response curve in E. coli transformed with an IPTG-inducible plasmid containing antisense to elaD (AS-elaD)in the absence (0) or presence of IPTG at concentrations that result in 20% and 50% growth inhibition.

[0408] FIG. 9 is a graph showing the fold increase in tetracycline sensitivity of E. coli transfected with antisense clones to essential ribosomal proteins L23 (AS-rplW) and L7/L12 and L10 (AS-rplLrplJ). Antisense clones to genes known to not be directly involved in protein synthesis, atpB/E (AS-atpB/E), visC (AS-visC), elaD (AS-elaD), yohH (AS-yohH), are much less sensitive to tetracycline.

[0409] FIG. 10 illustrates the results of an assay in which Staphylococcus aureus cells transcribing an antisense nucleic acid complementary to the gyrB gene encoding the β subunit of gyrase were contacted with several antibiotics whose targets were known.

### DETAILED DESCRIPTION OF EMBODIMENTS OF THE INVENTION

[0410] In various embodiments, the present teachings can be used to map some or all of the operons within a selected organism's genome while reducing the complexity of deconvolution resulting from polar effects created by conventional analytical methods. Unlike conventional methods which typically lack accuracy, specificity, and/or sensitivity, the present consensus-based model desirably improves the reliability of operon identification and capitalizes on a variety of different predictive methods. Using a novel approach to results analysis, improved usability is attained as compared to conventional operon identification methods when used independently of one another. Consequently, the task of operon prediction is significantly improved, especially when evaluating organisms for which limited experimental information exists.

[0411] FIG. 1 illustrates an exemplary consensus model for operon identification 100 incorporating a plurality of analytical categories 110 used in operon prediction. As described above, the present teachings offer improved predictive quality over singular approaches to operon prediction and may be used to selectively weight the contribution each singular approach has on the overall result obtained through consensus analysis. Exemplary operon prediction categories 110 from which the consensus model 100 may be derived include: promoter and boundary analysis 115; probabilistic machine learning approaches 120; intergenic distances analysis 125; and conserved gene cluster analysis 130. Additionally, other prediction methods 135 may be readily incorporated into the consensus model 100 to thereby maintain flexibility in operon identification that may include analytical methods and approaches other than those disclosed. As such, the disclosed operon prediction methods 110 used in conjunction with the consensus model 100 are conceived to represent but some of the various embodiments of operon prediction according to the present teachings and additional models using other operon prediction methods may be readily incorporated or substituted for those illustrated in FIG. 1.

[0412] In one aspect, boundary analysis 115 may be utilized to aid in operon identification. For example, applications and software algorithms are available for the prediction of transcriptional terminator motifs including rho-independent transcription terminators. Additionally, prokaryotic promoter-searching applications and algorithms may available. While conventional approaches may construct hidden Markov models (HMM) based on known promoters and terminators to aid in the prediction of operon structures, these methods are of limited utility when used alone and may yield marginal operon prediction accuracy. Furthermore, use of solely boundary analysis approaches 115 for operon prediction may be difficult to apply in prokaryotic organisms for which promoters and terminators are not well characterized. Additional details of this operon prediction category can be found in the following publications: (1) Brendel,V. and Trifonov, E. N. (1984) A computer algorithm for testing potential prokaryotic terminators. Nucleic Acids Res., 12, 4411-4427. (2) Brendel,V. and Trifonov,E. N. (1984) Computer-aided mapping of DNA-protein interaction sites. CODATA Conference Proc. (3) Ermolaeva,M. D., Khalak,H. G., White,O., Smith,H. O. and Salzberg,S. L. (2000) Prediction of transcription terminators in bacterial genomes. J. Mol. Biol, 301, 27-33. (4) Unniraman,S., Prakash,R. and Nagaraja,V. (2002) Conserved economics of transcription termination in eubacteria. Nucleic Acids Res., 30, 675-684. (5) Ozoline,O. N., Deev,A. A. and Arkhipova,M. V. (1997) Non-canonical sequence elements in the promoter structure. Cluster analysis of promoters recognized by Escherichia coli RNA polymerase. Nucleic Acids Res., 23, 4703X709. (6) Yada,T., Nakao,M., Totoki,Y. and Nakai,K. (1999) Modeling and predicting transcriptional units of Escherichia coli genes using hidden Markov models. Bioinformatics, 15, 987-993, the disclosures of which are incorporated herein by reference in their entireties.

[0413] Probabilistic machine learning approaches 120 may also be used to deduce operon composition and structure using a variety of data types including sequence data, gene expression data and functional annotation data. In one aspect, these methods may be used to estimate the probability that a consecutive sequence of genes residing on the same strand comprise an operon. As with boundary analysis 115, this method when used alone identifies operons with only marginal accuracy.

[0414] In one aspect, probabilistic machine learning approaches 120 may directed to operon identification through analysis of gene expression data obtained from microarrays and other multi-gene expression analysis methodologies. For example, operon structure may be deduced by co-expression pattern identification provided sufficient expression data is available. One potential difficulty encountered by conventional methods using solely this approach is that it is generally applicable only in organisms for which significant amounts of experimental data are available. Additional details of this operon prediction category can be found in the following publications: (1) Craven,M., Page,D., Shavlik,J., Bockhorst,J. and Glasner,J. (2000) A probabilistic learning approach to whole-genome operon prediction. ISMB, 8, 116-127. (2) Sabatti,C., Rohlin,L., Oh,M. and Liao,J. C. (2002) Co-expression pattern from DNA microarray experiments as a tool for operon prediction. Nucleic Acids Res., 30, 2886-2893, the disclosures of which are incorporated herein by reference in their entireties.

[0415] Intergenic distance analysis 125 represents another singular means for operon prediction 110. Using this approach, the intergenic distance between adjacent genes may be determined and operons predicted on the basis of the observation that genes within operons typically have substantially shorter intergenic distances as compared to genes at the borders of transcription units. This approach has been reported to provide a somewhat more efficient means to identify adjacent gene pairs contained within operons, however, the overall accuracy of this approach is still lacking and its use alone is not necessarily appropriate in all prokaryotic organisms. Additional details of this operon prediction category can be found in the following publication: Salgado,H., Moreno-Hagelsieb,G., Smith,T. F. and Collado-Vides,J. (2000) Operons in Escherichia coli: genomic analyses and predictions. Proc. Natl Acad. Sci. USA, 97, 6652-6657, the disclosures of which are incorporated herein by reference in their entireties.

[0416] Conserved gene cluster analysis 130 using a comparative genomics approach has been described as having a relatively high specificity in identifying co-transcribed gene pairs. Like the other approaches for operon prediction 110 described above, this approach 130 generally does not provide sufficient results by itself and may fail to predict all genes contained within identified operons. Additionally, the sensitivity of operon prediction when using solely this approach may be attenuated to a certain degree. Additional details of this operon prediction category can be found in the following publications: (1) Ermolaeva,M., White,O. and Salzberg,S. L. (2001) Prediction of operons in microbial genomes. Nucleic Acids Res., 29, 1216-1221. (2) Wolf,Y. I., Rogozin,I. B., Kondrashov,A. S. and Koonin,E. V. (2001) Genome alignment, evolution of prokaryotic genome organization, and prediction of gene function using genomic context. Genome Res. 11, 356-372, the disclosures of which are incorporated herein by reference in their entireties.

[0417] In various embodiments, the present teachings describe methods to obtain improved results in operon prediction over utilization of the foregoing approaches 110 in singular or independent manners. By developing a directed strategy to perform integrated analysis using various operon prediction methods in concert, for example, combined approaches using gene orientation analysis, intergenic distance analysis, conserved gene cluster analysis and terminator detection, significant improvements in accuracy and sensitivity can be obtained over utilization of any given technique alone. This integrated strategy or consensus analysis 140 serves as a basis for operon identification in which confidence scoring is performed using the results of one or more of the aforementioned operon prediction categories.

[0418] Various embodiments of the operon prediction methods described herein can be used to predict operons in any prokaryotic organism. These methods are especially useful for predicting operons in pathogenic microorganisms including, but not limited to, Acinetobacter baumannii, Anaplasma marginale, Bacillus anthracis, Bacteroides fragilis, Bordetella pertussis, Borrelia burgdorferi, Brucella abortus, Brucella melitensis, Burkholderia cepacia, Burkholderia fungorum, Burkholderia mallei, Campylobacter jejuni, Chlamydia pneumoniae, Chlamydia trachomatis, Clostridium acetobutylicum, Clostridium botulinum, Clostridium difficile, Clostridium perfringens, Corynebacterium diptheriae, Coxiella burnetii, Enterobacter cloacae, Enterococcus faecalis, Enterococcus faecium, Escherichia coli, Francisella tularensis, Haemophilus influenzae, Helicobacter pylori, Klebsiella pneumoniae, Legionella pneumophila, Listeria monocytogenes, Moraxella catarrhalis, Mycobacterium avium, Mycobacterium bovis, Mycobacterium leprae, Mycobacterium tuberculosis, Mycoplasma genitalium, Mycoplasma pneumoniae, Neisseria gonorrhoeae, Neisseria meningitidis, Nocardia asteroides, Pasteurella haemolytica, Pasteurella multocida, Proteus mirabilis, Proteus vulgaris, Pseudomonas aeruginosa, Pseudomonas putida, Pseudomonas syringae, Rickettsia rickettsii, Rochalimaea quintana, Salmonella bongori, Salmonella cholerasuis, Salmonella enterica, Salmonella paratyphi, Salmonella typhi, Salmonella typhimurium, Shigella boydii, Shigella dysenteriae, Shigella flexneri, Shigella sonnei, Staphylococcus aureus, Staphylococcus epidermidis, Staphylococcus haemolyticus, Streptococcus pneumoniae, Streptococcus mutans, Streptococcus pyogenes, Treponema pallidum, Ureaplasma urealyticum, Vibrio cholerae, Vibrio parahaemolyticus, Vibrio vulnificans, Yersinia enterocolitica, Yersinia pestis and any species falling within the genera of any of the above species.

[0419] In some embodiments, the methods described herein have been used to predict operons in Staphylococcus aureus. For example, the methods of operon prediction described herein were used to predict over 1397 operons from the protein-encoding genes in the genome of Staphylococcus aureus strain Mu50. Of the identified operons, approximately 62% were predicted to be monocistronic and approximately 38% were predicted to be polycistronic. Comparison with experimentally determined values for Staphylococcus aureus operons from literature sources indicated that the disclosed methods successfully predicted operon boundaries and genes contained within the each operon interior with a high degree of accuracy. The Staphylococcus aureus operons that are predicted by the methods described herein are provided in the Examples below in Table V.

[0420] Some embodiments of the present invention describe operons that are required for cellular proliferation. In some embodiments, the proliferation-required operon comprises one or more genes that are required for proliferation. In other embodiments, the operon may contain no genes that are singly required for proliferation but rather the operon contains a plurality of genes that, in combination, are required for proliferation. For example, an operon may consist of gene A and gene B, neither of which alone is required for proliferation. Thus, inhibition of the expression of either gene A or gene B alone would not be sufficient to inhibit the growth of the cell in which it is present. However, inhibiting the expression of both gene A and gene B together, for example, by inhibiting the expression of the polycistronic transcript by modulating the activity of the operon, would inhibit cell growth. For example, in some embodiments, an antisense nucleic acid complementary to all or a portion of one operon may be used to reduce the activity or level of the gene products encoded by gene A and gene B, or by reducing the activity or level of the polypeptides encoded by gene A and gene B. Certain embodiments of the present invention describe operons in Staphylococcus aureus that are required for cellular proliferation. Each of these operons is listed in the Examples below in Table V (SEQ ID NOs: 1-194). In some embodiments, a proliferation-required operon comprises a plurality of genes wherein one or more of the genes contained in the operon are required for the proliferation of Staphylococcus aureus. In other cases, the proliferation-required operon is monocistronic, and thus, comprises only a single gene, wherein this single gene is required for proliferation.

[0421] A proliferation-required gene is one where, in the absence or substantial reduction of a gene transcript and/or gene product, growth or viability of the cell or microorganism is reduced or eliminated. Thus, as used herein, the terminology “proliferation-required” or “required for proliferation” encompasses instances where the absence or substantial reduction of a gene transcript and/or gene product completely eliminates cell growth as well as instances where the absence of a gene transcript and/or gene product merely reduces cell growth. Typically, a proliferation required operon is one that contains one or more genes required for proliferation. However, in some embodiments, a proliferation-required operon includes those operons which contain no single gene that is required for proliferation, but rather, contains a plurality of genes that, in combination, are required for proliferation.

[0422] In accordance with another aspect of the present invention, vectors are disclosed which comprise a promoter operably linked to a operon that has been identified by an operon prediction method as described herein or operably linked to all or a portion of the noncoding strand of an operon that has been identified by an operon prediction method as described herein. In some embodiments, the operon can be an operon that is required for proliferation, for example, an operon which comprises at least one gene that is required for proliferation. In some embodiments of the present invention, the vectors include an operon which has been identified from a pathogenic microorganism including, but not limited to, Acinetobacter baumannii, Anaplasma marginale, Bacillus anthracis, Bacteroides fragilis, Bordetella pertussis, Borrelia burgdorferi, Brucella abortus, Brucella melitensis, Burkholderia cepacia, Burkholderia fungorum, Burkholderia mallei, Campylobacter jejuni, Chlamydia pneumoniae, Chlamydia trachomatis, Clostridium acetobutylicum, Clostridium botulinum, Clostridium difficile, Clostridium perfringens, Corynebacterium diptheriae, Coxiella burnetii, Enterobacter cloacae, Enterococcus faecalis, Enterococcus faecium, Escherichia coli, Francisella tularensis, Haemophilus influenzae, Helicobacter pylori, Klebsiella pneumoniae, Legionella pneumophila, Listeria monocytogenes, Moraxella catarrhalis, Mycobacterium avium, Mycobacterium bovis, Mycobacterium leprae, Mycobacterium tuberculosis, Mycoplasma genitalium, Mycoplasma pneumoniae, Neisseria gonorrhoeae, Neisseria meningitidis, Nocardia asteroides, Pasteurella haemolytica, Pasteurella multocida, Proteus mirabilis, Proteus vulgaris, Pseudomonas aeruginosa, Pseudomonas putida, Pseudomonas syringae, Rickettsia rickettsii, Rochalimaea quintana, Salmonella bongori, Salmonella cholerasuis, Salmonella enterica, Salmonella paratyphi, Salmonella typhi, Salmonella typhimurium, Shigella boydii, Shigella dysenteriae, Shigella flexneri, Shigella sonnei, Staphylococcus aureus, Staphylococcus epidermidis, Staphylococcus haemolyticus, Streptococcus pneumoniae, Streptococcus mutans, Streptococcus pyogenes, Treponema pallidum, Ureaplasma urealyticum, Vibrio cholerae, Vibrio parahaemolyticus, Vibrio vulnificans, Yersinia enterocolitica, Yersinia pestis or any species falling within the genera of any of the above species. In some embodiments, the vectors include an operon comprising a nucleotide sequence selected from the group consisting of SEQ ID NOs: 1-194 or all or a portion of the noncoding strand of a nucleotide sequence selected from the group consisting of SEQ ID NOs: 1-194.

[0423] Some aspects of the present invention contemplate that the operon-containing vectors described herein are transformed into a microorganism. The one or more genes contained in the operon may or may not be expressed in the host microbe.

[0424] Additionally, described herein are methods for identifying genes that are required for proliferation in an organism are described. These methods, which can be applied in a wide range of organisms, have been used as a preliminary step in the identification of proliferation-required operons. For example, once a gene has been identified as required for proliferation, its chromosomal location can be identified with respect to other adjacent genes. The operon prediction methods described herein are then used to determine whether one or more of the adjacent genes are contained in the same operon as the proliferation-required gene.

[0425] Some embodiments of the present invention contemplate methods of inhibiting cellular proliferation by inhibiting the activity or reducing the amount of one or more gene products that are produced by an operon that has been identified by an operon prediction method described herein. Although numerous methods of inhibiting proliferation are contemplated, such as, down-regulating the expression of the genes in an operon by controlling promoter activity or creating null mutants in a gene required for proliferation, modulation of operon activity using an antisense nucleic acid is of particular relevance. For example, an antisense nucleic acid which is complementary to at least a portion of a proliferation-required gene that is contained in an operon can be used to inhibit the activity or reduce the amount of the corresponding proliferation-required gene product thereby inhibiting proliferation of the cell in which the gene is present. However, since the proliferation-required gene is contained in an operon, an antisense nucleic acid which is complementary to a portion of the operon that does not include the identified proliferation-required gene can also be used to inhibit the activity or reduce the amount of product of the proliferation-required gene. In some embodiments, the antisense is complementary to at least a portion of another gene in the operon that is not required for proliferation. In other embodiments, the antisense is complementary to a nontranslated region of the operon. In many cases, the inhibition of the activity or reduction in the amount of the product of the proliferation-required gene will be due to a polar effect.

[0426] Further embodiments of the present invention relate to the inhibition of cellular proliferation by inhibiting the activity or reducing the amount of an operon that is required for proliferation wherein the operon does not contain a single gene that required for proliferation but rather the operon contains a plurality of genes that are, in combination, required for proliferation. In such embodiments, the inhibition or activity or reduction in the amount of multiple gene products which are not required for proliferation results in the inhibition of proliferation of a cell that is exposed to an antisense nucleic acid that is complementary to at least a portion of an the operon. Thus, the ability of a single antisense to simultaneously inhibit the activity or reduce the amount of a plurality of gene products can result in the inhibition of cellular proliferation even though none of the gene products are individually required for cellular proliferation.

[0427] Additional aspects of the present invention relate to methods for identifying compounds that possess the ability to inhibit cellular proliferation. As described further herein, cell-based methods can be used to identify compounds that inhibit proliferation. Compounds that are screened can be of any type but of particular relevance are products of natural product, semi-synthetic or fully synthetic chemical libraries. In some embodiments, compounds that inhibit cellular proliferation are identified by determining the identity of compounds which have the ability to reduce the proliferation of sensitized cells to a greater extent than cells which have not been sensitized. Cells are sensitized by providing a sublethal level an antisense nucleic acid that is complementary to at least a portion of an operon that is required for proliferation. In some embodiments of the present invention, the operon comprises a nucleotide sequence selected from the group consisting of SEQ ID NOs: 1-194. In other embodiments, the antisense is complementary to least a portion of an operon comprising a nucleotide sequence selected from the group consisting of SEQ ID NOs: 1-194, wherein the portion does not include a nucleotide sequence selected from the group consisting of SEQ ID NOs: 201-550.

[0428] In addition to the foregoing methods, antisense nucleic acids which are complementary to at least a portion of a proliferation-required operon in one species can be used in methods of inhibiting proliferation and methods of screening for compounds which inhibit proliferation in a second species which possesses one or more homologous sense nucleic acids, one or more homologous coding nucleic acids or one or more homologous polypeptides. For example, in one embodiment of the present invention, an antisense nucleic acid that is complementary to at least a portion of a proliferation-required operon comprising a nucleotide sequence selected from the group consisting of SEQ ID NOs: 1-194, wherein the portion does not include a nucleotide sequence selected from the group consisting of SEQ ID NOs: 201-550, can be used to inhibit the proliferation of a prokaryote which possesses a proliferation-required gene that is homologous to at least one nucleotide sequence selected from the group consisting of SEQ ID NOs: 201-550. In other embodiments, an antisense nucleic acid that is complementary to at least a portion of a proliferation-required operon comprising a nucleotide sequence selected from the group consisting of SEQ ID NOs: 1-194, wherein the portion does not include a nucleotide sequence selected from the group consisting of SEQ ID NOs: 201-550, can be used to inhibit the proliferation of a prokaryote which possesses a gene that encodes a gene product that is homologous to at least one amino acid sequence selected from the group consisting of SEQ ID NOs: 551-824.

[0429] It will be appreciated that the methods described herein for the inhibition of cellular proliferation and the identification of compounds that inhibit cellular proliferation can be performed in any prokaryotic microorganism that possesses one or more proliferation-required operons. For example, the methods described herein for the inhibition of cellular proliferation and the identification of compounds that inhibit cellular proliferation can be performed in Acinetobacter baumannii, Anaplasma marginale, Bacillus anthracis, Bacteroides fragilis, Bordetella pertussis, Borrelia burgdorferi, Brucella abortus, Brucella melitensis, Burkholderia cepacia, Burkholderia fungorum, Burkholderia mallei, Campylobacter jejuni, Chlamydia pneumoniae, Chlamydia trachomatis, Clostridium acetobutylicum, Clostridium botulinum, Clostridium difficile, Clostridium perfringens, Corynebacterium diptheriae, Coxiella burnetii, Enterobacter cloacae, Enterococcus faecalis, Enterococcus faecium, Escherichia coli, Francisella tularensis, Haemophilus influenzae, Helicobacter pylori, Klebsiella pneumoniae, Legionella pneumophila, Listeria monocytogenes, Moraxella catarrhalis, Mycobacterium avium, Mycobacterium bovis, Mycobacterium leprae, Mycobacterium tuberculosis, Mycoplasma genitalium, Mycoplasma pneumoniae, Neisseria gonorrhoeae, Neisseria meningitidis, Nocardia asteroides, Pasteurella haemolytica, Pasteurella multocida, Proteus mirabilis, Proteus vulgaris, Pseudomonas aeruginosa, Pseudomonas putida, Pseudomonas syringae, Rickettsia rickettsii, Rochalimaea quintana, Salmonella bongori, Salmonella cholerasuis, Salmonella enterica, Salmonella paratyphi, Salmonella typhi, Salmonella typhimurium, Shigella boydii, Shigella dysenteriae, Shigella flexneri, Shigella sonnei, Staphylococcus aureus, Staphylococcus epidermidis, Staphylococcus haemolyticus, Streptococcus pneumoniae, Streptococcus mutans, Streptococcus pyogenes, Treponema pallidum, Ureaplasma urealyticum, Vibrio cholerae, Vibrio parahaemolyticus, Vibrio vulnificans, Yersinia enterocolitica, Yersinia pestis or any species falling within the genera of any of the above species. In some embodiments, the methods described herein for the inhibition of cellular proliferation and the identification of compounds that inhibit cellular proliferation are performed in Staphylococcus aureus using an antisense nucleic acid that is complementary to at least a portion of an operon comprising a nucleotide sequence selected from the group consisting of SEQ ID NOs: 1-194, wherein the portion does not include a nucleotide sequence selected from the group consisting of SEQ ID NOs: 201-550.

[0430] Methods of Identifying Essential Genes

[0431] In some embodiments of the present invention, genes required for proliferation are identified. Thereafter, the operon in which the proliferation-required gene lies is identified using the methods described above. Antisense nucleic acids complementary to all or a portion of the identified operons are used in cell-based screening methods to identify compounds which inhibit proliferation. Methods of identifying genes required for proliferation have been previously described in U.S. patent application Ser. Nos. 09/492,709, entitled GENES IDENTIFIED AS REQUIRED FOR PROLIFERATION IN ESCHERICHIA COLI, filed Jan. 27, 2000; 09/711,164, entitled GENES ESSENTIAL FOR MICROBIAL PROLIFERATION AND ANTISENSE THERETO, filed Nov. 9, 2000; 09/741,669, entitled GENES IDENTIFIED AS REQUIRED FOR PROLIFERATION OF E. COLI, filed Dec. 19, 2000; 09/815,242, entitled IDENTIFICATION OF ESSENTIAL GENES IN PROKARYOTES, filed Mar. 21, 2001; 09/948,993, entitled RAPID METHOD FOR REGULATING GENE EXPRESSION, filed Sep. 6, 2001 and 10/282,122, entitled IDENTIFICATION OF ESSENTIAL GENES IN MICROORGANISMS, filed Oct. 25, 2002, the disclosures of which are incorporated herein by reference in their entireties. Exemplary methods are briefly described below.

[0432] Generally, a library of nucleic acid sequences from a given source are subcloned or otherwise inserted immediately downstream of an inducible promoter on an appropriate vector, such as a Staphylococcus aureus/E. coli or Pseudomonas aeruginosa/E. coli shuttle vector, or a vector which will replicate in both Salmonella typhimurium and Klebsiella pneumoniae, or other vector or shuttle vector capable of functioning in the intended organism, thus forming an expression library. It is generally preferred that expression is directed by a regulatable promoter sequence such that expression level can be adjusted by addition of variable concentrations of an inducer molecule or of an inhibitor molecule to the medium. For example, a number of regulatable promoters useful for regulating the expression of nucleic acid sequences over a wide range of expression levels are described in U.S. patent application Ser. No. 10/032,393, entitled BACTERIAL PROMOTERS AND METHODS OF USE, filed Dec. 21, 2001, the disclosure of which is incorporated herein by reference in its entirety. Temperature activated promoters, such as promoters regulated by temperature sensitive repressors, such as the lambda C₁₈₅₇ repressor, can also be used. Although the insert nucleic acids may be derived from the chromosome of the cell or microorganism into which the expression vector is to be introduced, because the insert is not in its natural chromosomal location, the insert nucleic acid is an exogenous nucleic acid. As used throughout this specification, the term “expression” is defined as the production of a sense or antisense RNA molecule from a gene, gene fragment, genomic fragment, chromosome, operon or portion thereof. Expression can also be used to refer to the process of peptide or polypeptide synthesis. An expression vector is defined as a vehicle by which a ribonucleic acid (RNA) sequence is transcribed from a nucleic acid sequence carried within the expression vehicle. The expression vector can also contain features that permit translation of a protein product from the transcribed RNA message expressed from the exogenous nucleic acid sequence carried by the expression vector. Accordingly, an expression vector can produce an RNA molecule as its sole product or the expression vector can produce a RNA molecule that is ultimately translated into a protein product.

[0433] Once generated, the expression library containing the exogenous nucleic acid sequences is introduced into a population of cells (such as the organism from which the exogenous nucleic acid sequences were obtained) to search for genes that are required for bacterial proliferation. Because the library molecules are foreign, in context, to the population of cells, the expression vectors and the nucleic acid segments contained therein are considered exogenous nucleic acid.

[0434] Expression of the exogenous nucleic acid fragments in the test population of cells containing the expression library is then activated. Activation of the expression vectors consists of subjecting the cells containing the vectors to conditions that result in the expression of the exogenous nucleic acid sequences carried by the expression library. The test population of cells is then assayed to determine the effect of expressing the exogenous nucleic acid fragments on the test population of cells. Those expression vectors that negatively impact the growth of the cells upon induction of expression of the random sequences contained therein are identified, isolated, and purified for further study.

[0435] Although general model for the identification of proliferation-required genes has been described above, it will be appreciated that modifications to this general method can be envisioned. A few exemplary modifications, which have been described elsewhere, are provided below.

[0436] In one example, the expression library of exogenous nucleic acids is inserted into a vector which comprises a regulatable fusion promoter selected from a suite of fusion promoters, wherein the promoter suite is useful for modulating both the basal and maximal levels of transcription of a nucleic acid over a wide dynamic range thus allowing the desired level of production of a transcript. Such promoters are described in U.S. patent application Ser. No. 10/032,393, entitled BACTERIAL PROMOTERS AND METHODS OF USE, filed Dec. 21, 2001, the disclosure of which is incorporated herein by reference in its entirety.

[0437] In another example, the expression library of exogenous nucleic acids is inserted into a vector useful for the production of stabilized mRNA having an increased lifetime (including antisense RNA) in Gram negative organisms. Such vectors are described in U.S. patent application Ser. No. 10/327592, entitled STABILIZED NUCLEIC ACIDS IN GENE AND DRUG DISCOVERY AND METHODS OF USE, filed Dec. 20, 2002, the disclosure of which is incorporated herein by reference in its entirety. Briefly, the antisense RNA which is produced from such expression vectors comprises at least one stem loop flanking each end of the antisense nucleic acid. In some versions of the vector, the at least one stem-loop structure formed at the 5′ end of the stabilized antisense nucleic acid comprises a flush, double stranded 5′ end. In other versions, one or more of the stem loops comprises a rho independent terminator. Further versions of the vectors permits transcription of a stabilized antisense RNA which lacks a ribosome binding site, which lacks sites that are cleaved by one or more RNAses, such as RNAse E or RNAse III, or which lacks both a ribosomal binding site and RNAse cleavage sites.

[0438] In other examples, expressed antisense RNAs are stabilized by transcribing the these nucleic acids in a cell in which the activity of at least one enzyme involved in RNA degradation has been reduced. For example, the activity of an enzyme such as RNase E, RNase II, RNase III, polynucleotide phosphorylase, and poly(A) polymerase, RNA helicase, enolase or an enzyme having similar functions may be reduced in the cell.

[0439] As an alternative to the above-described approach for the identification of proliferation-required genes, such genes may be identified by replacing the natural promoter for the proliferation required gene with a regulatable promoter. The growth of such strains under conditions in which the promoter is active or non-repressed is compared to the growth under conditions in which the promoter is inactive or repressed. If the strains fail to grow or grow at a substantially reduced rate under conditions in which the promoter is inactive or repressed but grow normally under conditions in which the promoter is active or non-repressed, then the gene which is operably linked to the regulatable promoter encodes a gene product required for proliferation. For example, proliferation-required genes and gene products identified using promoter replacement are described in U.S. patent application Ser. No. 09/948,993, entitled RAPID METHOD FOR REGULATING GENE EXPRESSION, filed Sep. 6, 2001, the disclosure of which is incorporated herein by reference in its entirety. An exemplary promoter replacement method is described below.

[0440] In promoter replacement methods for identifying genes required for proliferation, the natural promoter can be replaced using techniques which employ homologous recombination to exchange a promoter present on the chromosome of the cell with the desired promoter which is introduced into the cell on a promoter replacement cassette. The promoter replacement cassette comprises a 5′ region homologous to the sequence which is 5′ of the natural promoter in the chromosome, the promoter which is to replace the chromosomal promoter and a 3′ region which is homologous to sequences 3′ of the natural promoter in the chromosome. In some versions of promoter replacement, the promoter replacement cassette can also include a nucleic acid encoding an identifiable or selectable marker disposed between the 5′ region which is homologous to the sequence 5′ of the natural promoter and the promoter which is to replace the chromosomal promoter. If desired, the promoter replacement cassette can also contain a transcriptional terminator 3′ of the gene encoding an identifiable or selectable marker. After uptake of the promoter replacement cassette by the cell, homologous recombination is allowed to occur between the cassette and the chromosomal region containing the natural promoter. Cells in which the promoter replacement cassette has integrated into the chromosome are identified or selected. To confirm that homologous recombination has occurred, the chromosomal structure of the cells can be verified by Southern analysis or PCR.

[0441] In some versions of promoter replacement, the promoter replacement cassette can be introduced into the cell as a linear nucleic acid, such a PCR product or a restriction fragment. Alternatively, the promoter replacement can be introduced into the cell on a plasmid.

[0442] In other versions of promoter replacement, the cell into which the promoter replacement cassette is introduced can carry mutations which enhance its ability to be transformed with linear DNA or which enhance the frequency of homologous recombination. For example, if the cell is an Escherichia coli cell it can have a mutation in the gene encoding Exonuclease V of the RecBCD recombination complex. If the cell is an Escherichia coli cell it can have a mutation that activates the RecET recombinase of the Rac prophage and/or a mutation that enhances recombination through the RecF pathway. For example, the Escherichia coli cells can be RecB or RecC mutants carrying an sbcA or sbcB mutation. Alternatively, the Escherichia coli cells can be recD mutants. In other embodiments the Escherichia coli cells can express the λ Red recombination genes. For example, Escherichia coli cells suitable for use in techniques employing homologous recombination have been described in Datsenko, K. A. and Wanner, B. L., PNAS 97:6640-6645 (2000); Murphy, K. C., J. Bact 180: 2053-2071 (1998); Zhang, Y., et al., Nature Genetics 20: 123-128 (1998); and Muyrers, J. P. P. et al., Genes & Development 14: 1971-1982 (2000), the disclosures of which are incorporated herein by reference in their entireties. Additionally, a skilled artisan will appreciate that cells carrying mutations in similar genes can be constructed in organisms other than Escherichia coli.

[0443] In other versions of promoter replacement, a regulatable fusion promoter selected from a suite of fusion promoters, as described above and in U.S. patent application Ser. No. 10/032,393, BACTERIAL PROMOTERS AND METHODS OF USE, filed Dec. 21, 2001, can be used in the construction of the replacement cassette.

[0444] It will be appreciated that promoter replacement cassettes can be integrated anywhere in the bacterial genome. Accordingly, the cassette need not necessarily replace at native promoter, but rather, can be integrated upstream of one or more genes which lack a nearby promoter.

[0445] In addition to promoter replacement methods, regulatory element insertion/replacement methods can also be used in methods to identify genes required for proliferation. For example, a nonregulatable, native promoter which directs the transcription of a proliferation-required gene can be rendered regulatable by inserting a regulatory element into the chromosome of the cell via homologous recombination in a location where the regulatory element is capable of regulating the level of transcription from the promoter. A variety of regulatory elements can be used to regulate the expression of proliferation-required gene products. In some versions of this method, the regulatory element can be an operator which is recognized by a repressor (e.g. lac, tet, araBAD repressors), a transcriptional terminator or a nucleotide sequence which introduces a bend in the DNA.

[0446] To bring the proliferation-required gene under regulatory control, a linear regulatory element insertion cassette comprising a regulatory element, which is flanked by nucleotide sequences having homology to the natural promoter or other relevant locations upstream, downstream, or within the gene of interest, is introduced into the cell. In some embodiments, the cassette also comprises a nucleotide sequence encoding a selectable marker or a marker whose expression is readily identified. The cassette can be a double stranded nucleic acid or a single stranded nucleic acid as described in U.S. patent application Ser. No. 09/948,993, entitled RAPID METHOD FOR REGULATING GENE EXPRESSION, filed Sep. 6, 2001, the disclosure of which is incorporated herein by reference in its entirety. Upon homologous recombination, the regulatory element is inserted into the chromosome, leaving the gene required for proliferation under the control of the regulatory element. Strains in which the gene required for proliferation is under control of the regulatory element are grown under conditions in which the level of the proliferation-required gene product produced is less than the level in a wild type cell.

[0447] In some embodiments, the cell into which the promoter replacement cassette or regulatory element insertion cassette is introduced has an enhanced frequency of recombination. For example, the cells can lack or have a reduced level or activity of one or more exonucleases which would ordinarily degrade the DNA to be inserted into the chromosome. In further embodiments, the cells can both lack or have reduced levels of exonucleases and express or overexpress proteins involved in mediating homologous recombination. For example, if the methods are performed in Escherichia coli or other enteric prokaryotes, cells in which the activity of exonuclease V of the RecBCD recombination pathway, which degrades linear nucleic acids, has been reduced or eliminated, such as recB, recC, or recD mutants can be used. In some embodiments, the cells have mutations in more than one of the recB, recC, and recD genes which enhance the frequency of homologous recombination. For example the cells can have mutations in both the recB and recC genes.

[0448] The promoter replacement or regulatory element insertion methods can also be performed in Escherichia coli cells in which the activity of the RecET recombinase system of the Rac prophage has been activated, such as cells which carry an sbcA mutation. The RecE gene of the rac prophage encodes ExoVIII a 5′-3′ exonuclease, while the RecT gene of the Rac prophage encodes a single stranded DNA binding protein which facilitates renaturation and D-loop formation. Thus, the gene products of the RecE and RecT genes or proteins with analogous functions facilitate homologous recombination. The RecE and RecT genes lie in the same operon but are normally not expressed. However, sbcA mutants activate the expression the RecE and RecT genes. In some embodiments, the methods can be performed in cells which carry mutations in the recB and recC genes as well as the sbcA mutation. The RecE and RecT gene can be constitutively or conditionally expressed. For example, the methods can be performed in E. coli strain JC8679, which carries the sbcA23, recB21 and recC22 mutations.

[0449] In some embodiments, the methods can be performed in Escherichia coli cells in which recombination via the RecF pathway has been enhanced, such as cells which carry an sbcB mutation.

[0450] It will be appreciated that the RecE and RecT gene products, or proteins with analogous functions can be conditionally or constitutively expressed in prokaryotic organisms other than E. coli. In some embodiments, these proteins can be conditionally or constitutively expressed in Acinetobacter baumannii, Anaplasma marginale, Bacillus anthracis, Bacteroides fragilis, Bordetella pertussis, Borrelia burgdorferi, Brucella abortus, Brucella melitensis, Burkholderia cepacia, Burkholderia fungorum, Burkholderia mallei, Campylobacter jejuni, Chlamydia pneumoniae, Chlamydia trachomatis, Clostridium acetobutylicum, Clostridium botulinum, Clostridium difficile, Clostridium perfringens, Corynebacterium diptheriae, Coxiella burnetii, Enterobacter cloacae, Enterococcus faecalis, Enterococcus faecium, Escherichia coli, Francisella tularensis, Haemophilus influenzae, Helicobacter pylori, Klebsiella pneumoniae, Legionella pneumophila, Listeria monocytogenes, Moraxella catarrhalis, Mycobacterium avium, Mycobacterium bovis, Mycobacterium leprae, Mycobacterium tuberculosis, Mycoplasma genitalium, Mycoplasma pneumoniae, Neisseria gonorrhoeae, Neisseria meningitidis, Nocardia asteroides, Pasteurella haemolytica, Pasteurella multocida, Proteus mirabilis, Proteus vulgaris, Pseudomonas aeruginosa, Pseudomonas putida, Pseudomonas syringae, Rickettsia rickettsii, Rochalimaea quintana, Salmonella bongori, Salmonella cholerasuis, Salmonella enterica, Salmonella paratyphi, Salmonella typhi, Salmonella typhimurium, Shigella boydii, Shigella dysenteriae, Shigella flexneri, Shigella sonnei, Staphylococcus aureus, Staphylococcus epidermidis, Staphylococcus haemolyticus, Streptococcus pneumoniae, Streptococcus mutans, Streptococcus pyogenes, Treponema pallidum, Ureaplasma urealyticum, Vibrio cholerae, Vibrio parahaemolyticus, Vibrio vulnificans, Yersinia enterocolitica, Yersinia pestis or any species falling within the genera of any of the above species. For example, plasmids encoding these gene products can be introduced into the organism. If desired, the coding sequences encoding these gene products can be optimized to reflect the codon preferences of the organism in which they are to be expressed. Similarly, in some embodiments, the organism can contain mutations analogous to the recB, recC, recD, sbcA or sbcB mutations which enhance the frequency of homologous recombination.

[0451] In further embodiments, the promoter replacement or regulatory element insertion methods can be conducted in cells which utilize the Red system of bacteriophage lambda (λ) or analogous systems from other phages to enhance the frequency of homologous recombination. The Red system contains three genes, (γ,β and exo whose products are the Gam, Bet and Exo proteins (see Ellis et al. PNAS 98:6742-6746, 2001, the disclosure of which is incorporated herein by reference in its entirety). The Gam protein inhibits the RecBCD exonuclease V, thus permitting Beta and Exo to gain. access to the ends of the DNA to be integrated and facilitating homologous recombination. The Beta protein is a single stranded DNA binding protein that promotes the annealing of a single stranded nucleic acid to a complementary single stranded nucleic acid and mediates strand exchange. The Exo protein is a double-stranded DNA dependent 5′-3′ exonuclease that leaves 3′ overhangs that can act as substrates for recombination. Thus, constitutive or conditional expression of the λ Red proteins or proteins having analogous functions facilitates homologous recombination. It will be appreciated that the λ Beta, Gam and Exo proteins, or proteins with analogous functions can be expressed constitutively or conditionally in prokaryotic organisms other than E. coli. In some embodiments, these proteins can be conditionally or constitutively expressed in Acinetobacter baumannii, Anaplasma marginale, Bacillus anthracis, Bacteroides fragilis, Bordetella pertussis, Borrelia burgdorferi, Brucella abortus, Brucella melitensis, Burkholderia cepacia, Burkholderia fungorum, Burkholderia mallet, Campylobacter jejuni, Chlamydia pneumoniae, Chlamydia trachomatis, Clostridium acetobutylicum, Clostridium botulinum, Clostridium difficile, Clostridium perfringens, Corynebacterium diptheriae, Coxiella burnetii, Enterobacter cloacae, Enterococcus faecalis, Enterococcus faecium, Escherichia coli, Francisella tularensis, Haemophilus influenzae, Helicobacter pylori, Klebsiella pneumoniae, Legionella pneumophila, Listeria monocytogenes, Moraxella catarrhalis, Mycobacterium avium, Mycobacterium bovis, Mycobacterium leprae, Mycobacterium tuberculosis, Mycoplasma genitalium, Mycoplasma pneumoniae, Neisseria gonorrhoeae, Neisseria meningitidis, Nocardia asteroides, Pasteurella haemolytica, Pasteurella multocida, Proteus mirabilis, Proteus vulgaris, Pseudomonas aeruginosa, Pseudomonas putida, Pseudomonas syringae, Rickettsia rickettsii, Rochalimaea quintana, Salmonella bongori, Salmonella cholerasuis, Salmonella enterica, Salmonella paratyphi, Salmonella typhi, Salmonella typhimurium, Shigella boydii, Shigella dysenteriae, Shigella flexneri, Shigella sonnet, Staphylococcus aureus, Staphylococcus epidermidis, Staphylococcus haemolyticus, Streptococcus pneumoniae, Streptococcus mutans, Streptococcus pyogenes, Treponema pallidum, Ureaplasma urealyticum, Vibrio cholerae, Vibrio parahaemolyticus, Vibrio vulnificans, Yersinia enterocolitica, Yersinia pestis or any species falling within the genera of any of the above species. For example, plasmids encoding these gene products can be introduced into the organism. If desired, the coding sequences encoding these gene products can be optimized to reflect the codon preferences of the organism in which they are to be expressed.

[0452] In some embodiments, the cells can have an increased frequency of homologous recombination as a result of more than one of the aforementioned characteristics. In some embodiments, the enhanced frequency of recombination can be a conditional characteristic of the cells which depends on the culture conditions in which the cells are grown. For example, in some embodiments, expression of the λ Red Gam, Exo, and Beta proteins or recE and recT proteins can be regulated. Thus, the cells can have an increased frequency of homologous recombination as a result of any combination of the aforementioned characteristics. For example, in some embodiments, the cell can carry the sbcA and recBC mutations.

[0453] In some embodiments, a linear double stranded DNA to be inserted into the chromosome of the organism is introduced into an organism constitutively or conditionally expressing the recE and recT or the λ Beta, Gam and Exo proteins or proteins with analogous functions as described above. In some embodiments, the organism can be Acinetobacter baumannii, Anaplasma marginale, Bacillus anthracis, Bacteroides fragilis, Bordetella pertussis, Borrelia burgdorferi, Brucella abortus, Brucella melitensis, Burkholderia cepacia, Burkholderia fungorum, Burkholderia mallei, Campylobacter jejuni, Chlamydia pneumoniae, Chlamydia trachomatis, Clostridium acetobutylicum, Clostridium botulinum, Clostridium difficile, Clostridium perfringens, Corynebacterium diptheriae, Coxiella burnetii, Enterobacter cloacae, Enterococcus faecalis, Enterococcus faecium, Escherichia coli, Francisella tularensis, Haemophilus influenzae, Helicobacter pylori, Klebsiella pneumoniae, Legionella pneumophila, Listeria monocytogenes, Moraxella catarrhalis, Mycobacterium avium, Mycobacterium bovis, Mycobacterium leprae, Mycobacterium tuberculosis, Mycoplasma genitalium, Mycoplasma pneumoniae, Neisseria gonorrhoeae, Neisseria meningitidis, Nocardia asteroides, Pasteurella haemolytica, Pasteurella multocida, Proteus mirabilis, Proteus vulgaris, Pseudomonas aeruginosa, Pseudomonas putida, Pseudomonas syringae, Rickettsia rickettsii, Rochalimaea quintana, Salmonella bongori, Salmonella cholerasuis, Salmonella enterica, Salmonella paratyphi, Salmonella typhi, Salmonella typhimurium, Shigella boydii, Shigella dysenteriae, Shigella flexneri, Shigella sonnei, Staphylococcus aureus, Staphylococcus epidermidis, Staphylococcus haemolyticus, Streptococcus pneumoniae, Streptococcus mutans, Streptococcus pyogenes, Treponema pallidum, Ureaplasma urealyticum, Vibrio cholerae, Vibrio parahaemolyticus, Vibrio vulnificans, Yersinia enterocolitica, Yersinia pestis or any species falling within the genera of any of the above species. In some embodiments, the double stranded DNA can be introduced into an organism having the recBC and sbcA mutations or analogous mutations.

[0454] In other embodiments, a single stranded DNA to be inserted into the chromosome of the organism is introduced into an organism expressing the λ Beta protein or a protein with an analogous function. In some embodiments the single stranded DNA is introduced into an organism expressing both the λ Beta and Gam proteins or proteins with analogous functions. In further embodiments, the single stranded DNA is introduced into an organism expressing the λ Beta, Gam and Exo proteins or proteins with analogous functions. The λ proteins or analogous proteins can be expressed constitutively or conditionally. In some embodiments, the organism can be Acinetobacter baumannii, Anaplasma marginale, Bacillus anthracis, Bacteroides fragilis, Bordetella pertussis, Borrelia burgdorferi, Brucella abortus, Brucella melitensis, Burkholderia cepacia, Burkholderia fungorum, Burkholderia mallei, Campylobacter jejuni, Chlamydia pneumoniae, Chlamydia trachomatis, Clostridium acetobutylicum, Clostridium botulinum, Clostridium difficile, Clostridium perfringens, Corynebacterium diptheriae, Coxiella burnetii, Enterobacter cloacae, Enterococcus faecalis, Enterococcus faecium, Escherichia coli, Francisella tularensis, Haemophilus influenzae, Helicobacter pylori, Klebsiella pneumoniae, Legionella pneumophila, Listeria monocytogenes, Moraxella catarrhalis, Mycobacterium avium, Mycobacterium bovis, Mycobacterium leprae, Mycobacterium tuberculosis, Mycoplasma genitalium, Mycoplasma pneumoniae, Neisseria gonorrhoeae, Neisseria meningitidis, Nocardia asteroides, Pasteurella haemolytica, Pasteurella multocida, Proteus mirabilis, Proteus vulgaris, Pseudomonas aeruginosa, Pseudomonas putida, Pseudomonas syringae, Rickettsia rickettsii, Rochalimaea quintana, Salmonella bongori, Salmonella cholerasuis, Salmonella enterica, Salmonella paratyphi, Salmonella typhi, Salmonella typhimurium, Shigella boydii, Shigella dysenteriae, Shigella flexneri, Shigella sonnei, Staphylococcus aureus, Staphylococcus epidermidis, Staphylococcus haemolyticus, Streptococcus pneumoniae, Streptococcus mutans, Streptococcus pyogenes, Treponema pallidum, Ureaplasma urealyticum, Vibrio cholerae, Vibrio parahaemolyticus, Vibrio vulnificans, Yersinia enterocolitica, Yersinia pestis or any species falling within the genera of any of the above species.

[0455] Regardless of which of the above-described methods are selected, a variety of assays can be used to identify nucleic acid sequences that negatively impact growth upon expression. For example, with respect to the approach based on expression of a library of exogenous nucleic acids, growth in cultures expressing exogenous nucleic acid sequences is compared to growth in cultures not expressing these sequences. Growth measurements are assayed by examining the extent of growth by measuring optical densities. Alternatively, enzymatic assays can be used to measure bacterial growth rates to identify exogenous nucleic acid sequences of interest. Colony size, colony morphology, and cell morphology are additional factors used to evaluate growth of the host cells. Those cultures that fail to grow or grow at a reduced rate under expression conditions are identified as containing an expression vector encoding a nucleic acid fragment that negatively affects a proliferation-required gene.

[0456] Once a nucleic acids of interest is identified, it can be analyzed. The first step of the analysis is to acquire the nucleotide sequence of the nucleic acid fragment of interest. In cases where expression libraries were used, the exogenous nucleic acid insert contained in an expression vector that is identified as containing a nucleotide sequence that negatively affects proliferation is sequenced using standard techniques well known in the art. The next step of the process is to determine the source of the nucleotide sequence. As used herein “source” means the genomic region containing the cloned fragment.

[0457] Determination of the gene(s) corresponding to the nucleotide sequence is achieved by comparing the obtained sequence data with databases containing known protein and nucleotide sequences from various microorganisms. Thus, initial gene identification is made on the basis of significant sequence similarity or identity to either characterized or predicted Escherichia coli, Staphylococcus aureus, Enterococcus faecalis, Klebsiella pneumoniae, Pseudomonas aeruginosa, and Salmonella typhimurium genes or their encoded proteins and/or homologues in other species.

[0458] The number of nucleotide and protein sequences available in database systems has been growing exponentially for years. For example, the complete nucleotide sequences of several bacterial genomes, including E. coli, Aeropyrum pernix, Aquifex aeolicus, Archaeoglobus fulgidus, Bacillus subtilis, Borrelia burgdorferi, Chlamydia pneumoniae, Chlamydia trachomatis, Clostridium tetani, Corynebacterium diptheria, Deinococcus radiodurans, Haemophilus influenzae, Helicobacter pylori 26695, Helicobacter pylori J99, Methanobacterium thermoautotrophicum, Methanococcus jannaschii, Mycobacterium tuberculosis, Mycoplasma genitalium, Mycoplasma pneumoniae, Pseudomonas aeruginosa, Pyrococcus abyssi, Pyrococcus horikoshii, Rickettsia prowazekii, Synechocystis PCC6803, Thermotoga maritima, Treponema pallidum, Bordetella pertussis, Campylobacter jejuni, Clostridium acetobutylicum, Mycobacterium tuberculosis CSU#93, Neisseria gonorrhoeae, Neisseria meningitidis, Pseudomonas aeruginosa, Pyrobaculum aerophilum, Pyrococcus furiosus, Rhodobacter capsulatus, Salmonella typhimurium, Streptococcus mutans, Streptococcus pyogenes, Ureaplasma urealyticum and Vibrio cholera are available. This nucleotide sequence information is stored in a number of databanks, such as GenBank, the National Center for Biotechnology Information (NCBI), the Genome Sequencing Center and the Sanger Centre, which are publicly available for searching. For example, genomic sequences and related information from the Genome Sequencing Center is available on the internet and can be accessed by entering the following quoted text, “genome.wustl”, in the address bar of a web browser, such as Internet Explorer or Netscape, followed immediately by “.edu/gsc/salmonella/shtml”. Likewise sequence data from the Sanger Center can be accessed by entering the following quoted text, “www.sanger.ac”, in the address bar of a web browser, such as Internet Explorer or Netscape, followed immediately by “.uk/projects/S_{—}typhi”.

[0459] A variety of computer programs are available to assist in the analysis of the sequences stored within these databases. FASTA, (W. R. Pearson (1990) “Rapid and Sensitive Sequence Comparison with FASTP and FASTA” Methods in Enzymology 183:63-98), Sequence Retrieval System (SRS), (Etzold & Argos, SRS an indexing and retrieval tool for flat file data libraries. Comput. Appl. Biosci. 9:49-57, 1993) are two examples of computer programs that can be used to analyze sequences of interest. In one embodiment of the present invention, the BLAST family of computer programs, which includes BLASTN version 2.0 with the default parameters, or BLASTX version 2.0 with the default parameters, is used to analyze nucleotide sequences.

[0460] BLAST, an acronym for “Basic Local Alignment Search Tool,” is a family of programs for database similarity searching. The BLAST family of programs includes: BLASTN, a nucleotide sequence database searching program, BLASTX, a protein database searching program where the input is a nucleic acid sequence; and BLASTP, a protein database searching program. BLAST programs embody a fast algorithm for sequence matching, rigorous statistical methods for judging the significance of matches, and various options for tailoring the program for special situations. tBLASTX can be used to translate a nucleotide sequence in all three potential reading frames into an amino acid sequence.

[0461] The above described methods have previously been used to identify numerous proliferation-required genes in Staphylococcus aureus as well as numerous other organisms. For example, these methods have been used to identify a group of genes, each having a nucleotide sequence selected from the group consisting of SEQ ID NOs: 201-550, as required for cellular proliferation. Each of these genes encodes a proliferation-required gene product which has an amino acid sequence selected from the group consisting of SEQ ID NOs: 551-824. Proliferation required genes have also been identified from numerous other bacteria. It will be appreciated that the above-described methods can be used in any microorganisms including, but not limited to, pathogenic bacteria such as, Acinetobacter baumannii, Anaplasma marginale, Bacillus anthracis, Bacteroides fragilis, Bordetella pertussis, Borrelia burgdorferi, Brucella abortus, Brucella melitensis, Burkholderia cepacia, Burkholderia fungorum, Burkholderia mallei, Campylobacter jejuni, Chlamydia pneumoniae, Chlamydia trachomatis, Clostridium acetobutylicum, Clostridium botulinum, Clostridium difficile, Clostridium perfringens, Corynebacterium diptheriae, Coxiella burnetii, Enterobacter cloacae, Enterococcus faecalis, Enterococcus faecium, Escherichia coli, Francisella tularensis, Haemophilus influenzae, Helicobacter pylori, Klebsiella pneumoniae, Legionella pneumophila, Listeria monocytogenes, Moraxella catarrhalis, Mycobacterium avium, Mycobacterium bovis, Mycobacterium leprae, Mycobacterium tuberculosis, Mycoplasma genitalium, Mycoplasma pneumoniae, Neisseria gonorrhoeae, Neisseria meningitidis, Nocardia asteroides, Pasteurella haemolytica, Pasteurella multocida, Proteus mirabilis, Proteus vulgaris, Pseudomonas aeruginosa, Pseudomonas putida, Pseudomonas syringae, Rickettsia rickettsii, Rochalimaea quintana, Salmonella bongori, Salmonella cholerasuis, Salmonella enterica, Salmonella paratyphi, Salmonella typhi, Salmonella typhimurium, Shigella boydii, Shigella dysenteriae, Shigella flexneri, Shigella sonnei, Staphylococcus aureus, Staphylococcus epidermidis, Staphylococcus haemolyticus, Streptococcus pneumoniae, Streptococcus mutans, Streptococcus pyogenes, Treponema pallidum, Ureaplasma urealyticum, Vibrio cholerae, Vibrio parahaemolyticus, Vibrio vulnificans, Yersinia enterocolitica, Yersinia pestis and any species falling within the genera of any of the above species.

[0462] Although the above methods are useful for determining the identity of genes required for proliferation, there are times when the nucleic acid that is identified corresponds to a nucleotide sequence other than a proliferation-required gene or a portion thereof. For example, when using the exogenous library method, the provided nucleic acid can inhibit the activity or reduce the amount of a product of a proliferation-required gene that is contained in an operon by inhibiting the expression of the entire polycistronic transcript that is produced by the operon or by inhibiting the expression of a portion of the polycistronic transcript which comprises the proliferation-required gene. Such an inhibition of the production of multiple gene products from a polycistronic transcript is known as a polar effect. Thus, in the context of an operon, it is possible that the exogenous nucleic acid, which has been identified as inhibiting the activity or reducing the amount of a proliferation-required gene product, corresponds to a gene that is required for proliferation or portion thereof, a 5′ noncoding region or a 3′ noncoding region located upstream or downstream from the actual gene that is required for proliferation or a portion thereof, an intergenic sequence (i.e. a sequence between genes) or a portion thereof, a gene that is not required for proliferation or a portion thereof, or a nucleotide sequence spanning at least a portion of two or more genes.

[0463] Given the nature of the screening protocol, it would be useful to identify operon boundaries and then determine the which gene(s) contained in the operon are individually required for proliferation. The methods described below can be used to identify operons in prokaryotic organisms. These techniques are especially useful in organisms for which substantial genomic sequence is available but for which little or no data regarding operon structure exists.

[0464] Methods of Operon Prediction

[0465] One aspect of the present invention relates to methods for predicting operons in the genome of an organism, such as a prokaryotic organism. As will be described in greater detail hereinbelow, sequence data can be used to demonstrate how certain methods and approaches are implemented by the present teachings to perform operon prediction and identification. The methods described herein may be utilized with any organism. In a preferred embodiment, the organism is a prokaryotic organism. In one aspect, the complete genomic sequence of Staphylococcus aureus Mu50 strain serves as an exemplary prokaryotic genome used in consensus analysis and operon prediction. Additional details of this genome may be found in the publication: Kuroda, M., et al., “Whole genome sequencing of methicillin-resistant Staphylococcus aureus, the major hospital pathogen.” Lancet 357, 1225-1240, (2001). The genomic information from this bacterial strain may be obtained from NCBI by entering the following quoted text, “www.ncbi.nlm.nih.”, in the address bar of a web browser, such as Internet Explorer or Netscape, followed immediately by “gov:80/PMGifs/Genomes/org.html”. The genomic information can then be imported into a local database. In one embodiment, the microbial sequence database, PathoSeq™ (Elitra, San Diego, Calif.) was used as the local database for storage of information used in operon prediction according to the present teachings.

[0466] Sequences for other bacterial genomes used in the below-described exemplary comparative genome analysis were also obtained from The National Center for Biotechnology Information (NCBI) or The Institute for Genomic Research (TIGR) and imported to the local database. The genome sequences obtained from NCBI include: Aquifex aeolicus strain VF5, Borrelia burgdorferi strain B31, Bacillus halodurans C-125, Bacillus subtilis strain 168, Buchnera sp. APS, Clostridium acetobutylicum ATCC824, Caulobacter crescentus CB 15, Campylobacter jejuni strain NCTC 11168, Chlamydiapneumoniae strain AR-39, Chlamydia trachomatis strain MoPn, Escherichia coli strain K-12, Haemophilus influenzae strain KW20, Helicobacter pylori strain 26695, Listeria monocytogenes, Listeria innocua, Lactococcus lactis strain IL1403, Mycoplasma genitalium isolate G37, Mycobacterium leprae strain TN, Mycoplasma pneumoniae strain M129, Mycoplasma pulmonis UAB CTIP, Mycobacterium tuberculosis CDC1551, Neisseria meningitides strain MC58, Pseudomonas aeruginosa strain PAO1, Pasteurella multocida Pm70, Rickettsia conorii Malish 7, Rickettsia prowazekii strain Madrid E, Sinorhizobium meliloti 1021, Streptococcus pneumoniae strain R6 hex, Streptococcus pyogenes strain M1 GAS, Salmonella typhi strain CT18, Salmonella typhimurium strain SGSC1412, Synechocystis sp. strain PCC 6803, Thermotoga maritime strain MSB8, Treponema pallidum strain Nichols, Ureaplasma urealyticum, Vibrio cholerae strain N16961, Xylella fastidiosa 9a5c and Yersinia pestis strain CO-92 Biovar Orientalis. The genome sequence of Enterococcus facaelis strain V583 was downloaded from TIGR.

[0467] With reference to FIG. 1, one aspect of the present invention provides a consensus model for operon prediction 100 which defines a computational pipeline to annotate operons in a prokaryotic organism's genome. As will be described in greater detail hereinbelow, the consensus model 100 utilizes a technique for pairwise analysis of genes using the various operon prediction methods 110 to assess the likelihood that adjacent gene pairs reside within the same operon. Operon prediction in this manner provides a relatively rapid and reliable means for identifying co-transcribed genes with greater accuracy and sensitivity. As will be appreciated by one of skill in the art, the validity of this model can be readily assessed by evaluation of known operons for selected organisms and comparison of the results obtained with literature values. Additionally, operon prediction may proceed without known information regarding operon structure and therefore may desirably be used in connection with prokaryotic organisms for which little or no operon information currently exists.

[0468] FIG. 2 illustrates a computation pipeline 200 for operon prediction in which the aforementioned consensus model 100 is utilized. In one aspect, this method 200 is capable of performing rapid and reliable analysis for one or more target organisms whose genomic composition is to be evaluated. It will be appreciated that the below-described methods may be readily transformed or adapted to a corresponding software application or system to be used in computerized analysis. Furthermore, these methods may be integrated into other software and hardware components to provide increased functionality in operon identification. It is therefore conceived that software and hardware implementations which integrate the use of the consensus analysis model 100 or computational pipeline 200 are but other embodiments of the present teachings.

[0469] The method 200 commences in a state 210 wherein at least one target prokaryotic organism and associated genomic information is identified. The genomic information may further comprise either a portion or the entirety of the nucleotide sequence representative of the organism's genomic makeup. In one aspect, it is desirable to utilize the complete nucleotide sequence for the organism's genome, if available, to aid in the identification of substantially all operons. The disclosed methods however, will also operate with a selected portion of the genomic sequence.

[0470] Following selection of the target prokaryotic organism genomic information 210, the method 200 proceeds to state 215 wherein an orientation analysis is performed. In one aspect, the orientation analysis comprises identifying pairs of genes and assessing their orientation relative to one another. For example, with respect to a gene having a 5′ - - - 3′ orientation, a paired gene may either be oriented in the same direction (i.e. 5′ - - - 3′) or alternatively the paired gene may be oriented in the opposing direction (i.e. 3′ - - - 5′). Thus, a complete orientation analysis may be performed for each gene in the identified genomic information 210 by identifying flanking or consecutive gene pairs and determining the orientation of the constituent genes with respect to one another. The results of such an orientation analysis 215 are representative of the plurality of consecutive gene pairings and their respective orientations (being either similarly or oppositely aligned).

[0471] Using the information provided by the orientation analysis, each gene obtained from the genomic information of the target organism may then be segregated into one of two categories comprising bins or groupings 220. The first grouping category comprises a single-gene bin 225 containing genes having an opposite alignment relative to their 5′ and 3′ flanking genes. Genes which fall into this category are considered to form monocistronic operons which may be indicative of a transcription unit containing a single gene. The second grouping category comprises a multi-gene bin 230 containing genes having at least one flanking or consecutive gene aligned in the same orientation as the selected gene. Genes which fall into this category 230 are further evaluated to determine whether they lie in polycistronic operons having a transcription unit containing more than one gene. Thus, for a selected target organism, each gene identified in the genomic information is desirably segregated into one of two principal bins being either the single-gene bin 225 or the multi-gene bin 230. In the instance of genes which are segregated into the multi-gene bin 230 these genes are further segregated based on their composition and similarity in orientation as will be described in greater detail hereinbelow.

[0472] In one aspect, the multi-gene bin 230 comprises a plurality of discrete groupings with each grouping containing two or more consecutive genes that are determined to be aligned in the same orientation with respect to one another. Segregation of consecutive genes possessing similar orientations into the discrete groupings of the multi-gene bin 230 provides a means for associating genes which may be part of the same putative polycistronic operon. Additionally, by separating each of the genes contained in the supplied genomic information into the single-gene bin 225 or the multi-gene bin 230 desirably reduces the actual number of genes which will undergo more rigorous consensus analysis whereby genes associated with the single-gene bin 225 may be identified as monocistrons in state 235 and excluded from further analysis. In one aspect, the above-described manner of initial segregation desirably improves the speed and performance of co-transcriptional or operon analysis by focusing rigorous computation efforts on those genes which have a significant possibility of being part of a polycistronic operon. In one aspect, the analysis of the genes contained in the single gene bin 225 is desirably completed early in the computational pipeline 200 resulting in less downstream data and information to be processed.

[0473] Applying the aforementioned approach to the genes contained in the genome for the exemplary organism, Staphylococcus aureus, a total of approximately 2790 genes (including tRNA and rRNA genes) were resolved to a total of approximately 670 discrete bins 220. Of these bins 220, approximately 273 contain a single gene with no flanking gene in the same orientation and the remaining 297 bins were identified as comprising multiple consecutive genes having similar orientations. For the identified multi-gene bins 230, the number of consecutive genes contained in the bin may range from 2 to approximately 63 genes or more with an average of approximately 6.34 genes per multi-gene bin 230. The preceding example demonstrates the pipeline's ability to rapidly identify a significant number of monocistrons from the genomic information and furthermore shows how genes which may be part of a polycistronic operon may be segregated into discrete groupings in preparation for further analysis.

[0474] Having identified those gene pairs associated with the multi-gene bin 230 the pipeline 200 proceeds to the consensus analysis state 140. As previously described, consensus analysis may comprise subjecting each gene or gene pair to various analytical approaches used in operon prediction. As shown in FIG. 2, three exemplary approaches which may be used alone or in conjunction with one or more of the other approaches during consensus analysis 140 include: intergenic distance analysis 125, conserved gene cluster analysis 130, and boundary analysis 115.

[0475] In various embodiments, intergenic distance analysis 125 may be performed using some or all of the genes and associated gene pairings contained in the multi-gene bin 230 wherein the genes are identified by orientation relative to proximal 5′ and 3′ flanking genes. The intergenic distances between adjacent genes in the same orientation may then be calculated from the corresponding genomic coordinates in the target organism or strain. For example, the intergenic distance between a first gene_{A} and a second gene_{B} may be calculated according to the following formula: distance_{AB}=gene_{B}_{_{—}}start_position-gene_{A}_{_{—}}end_position. The orientation and distance information for of each gene pair may be subsequently saved (for example in a database or other data structure) and used for purposes of operon identification in the manner described below.

[0476] In one aspect, the intergenic distance analysis 125 takes into account the observation that the intergenic distance between selected genes contained within an operon may be shorter than distances between genes not contained within the same operon. In applying this approach, an intergenic distance analysis 125 may be conducted according to a prediction scheme in which gene pairs in the same discrete grouping in the multi-gene bin 230 are considered to be in the same putative operon if their intergenic distance falls below a selected distance threshold.

[0477] In one aspect, an ideal distance threshold may not be readily apparent due to insufficient experimental or literature data for a selected organism. Consequently, if desired, as shown in FIGS. 3A and 3B the distance threshold may be determined by comparison of the genomic information for the selected or target organism with one or more reference organisms.

[0478] In FIG. 3A, a method 300 for distance threshold selection is illustrated. The method 300 commences in a state 310 with a determination of the intergenic distance distribution across adjacent gene pairs contained in the multi-gene bin 230 for the target or selected organism. In state 320, this information may then be compared with an assessment of overall intergenic distance distributions for one or more reference organisms for which the genome organizations are known in part or whole. By comparing the target organism's intergenic distance distribution with that of the one or more reference organisms whose genomic organizations bear relative similarities in terms of gene spacing, an approximate distance threshold may be identified in state 330.

[0479] FIG. 3B, further illustrates the method 300 of distance threshold selection wherein the overall intergenic distribution for an exemplary target organism, Staphylococcus aureus, is compared to the overall intergenic distributions for a plurality of other reference organisms including for example: Aquifex aeolicus Chlamydia pneumoniae and Escherichia coli. As shown in this figure, the intergenic distances between adjacent gene pairs for the comparison organism Escherichia coli were similar in many instances to adjacent gene pairs in the same orientation for the target organism Staphylococcus aureus. Using this information, as well as that for the other reference organisms, an approximation of the intergenic distribution for the target organism may be determined to reside between approximately −20 bp and 60 bp around stop codons for the first genes with a prominent peak occurring at approximately 20 bp. Using this information, it may be reasonable to infer that the distribution of intergenic distances for the target organism may bear similarities to that of the other comparison organisms and that it may be feasible to use “generic” or cross-organism distance thresholds for operon prediction in a broad number of bacteria species.

[0480] To further refine the selected distance threshold obtained in state 330, the effects of selecting different distance thresholds for operon prediction in the target organism may be evaluated and their results compared. Table I illustrates by way of example, the effects of selecting different distance thresholds for the target organism Staphylococcus aureus. As shown in the table, comparison of putative operons at different thresholds including 30 bp, 50 bp, 75 bp, 100 bp, 150 bp and 200 bp using intergenic distance analysis 125 alone may be used to aid in the identification of an appropriate stringency and corresponding distance threshold to be selected in the consensus analysis 140. From the data, both the 30 bp and 50 bp thresholds appear to be highly stringent whereas the 150 bp and 200 bp thresholds appear to be significantly less stringent with the 75 bp and 100 bp thresholds falling somewhere in between in terms of overall stringency.

TABLE I
Comparison of putative operons at different intergenic distance
thresholds using the intergenic distance analysis method alone

| | | Single-Gene Bins | Muti-gene Bins | | Largest |
|---|---|---|---|---|---|
| Distance | Identified | Identified | Identified | Identified | Identified |
| Threshold (bp) | Operons | Monocistrons | Monocistrons | Polycistrons | Operon Size |
| 30 | 1820 | 273 | 757 | 517 | 14 |
| 50 | 1718 | 273 | 632 | 540 | 25 |
| 75 | 1610 | 273 | 502 | 562 | 25 |
| 100 | 1541 | 273 | 428 | 567 | 25 |
| 150 | 1385 | 273 | 265 | 574 | 29 |
| 200 | 1237 | 273 | 113 | 578 | 46 |

[0481] Using this information along with literature and/or experimental information a distance threshold may be selected which balances the expected number of false positive and false negatives. For example, a distance threshold of 75 bp or 100 bp may be selected; however, other values may be also selected in order to achieve other desired stringencies.

[0482] Referring again to FIG. 2, another consensus analysis model 140 comprises the conserved gene cluster approach 130. This method 130 is based upon the observation that evaluation of conserved gene order across various bacterial genomes may reveal gene clusters which may have an increased probability of residing within the same operon. In one aspect, this method 130 uses available sequence information from one or more prokaryotic genomes that is compared to the target organism's genomic information. As will be described in greater detail hereinbelow, using the criteria of sequence composition and location, operon prediction in the target organism can be performed by this method and compliment or supplement other methods used in consensus analysis 140.

[0483] FIG. 4 illustrates a method 400 for conserved gene cluster analysis 130 that may be used in operon identification. In one aspect, this method utilizes genomic information from at least one comparison organism which is analyzed against the genes contained in the target organism. Gene conservation between the organisms can be performed using sequence analysis applications including for example, BLASTP or BLASTN, wherein orthologs for a gene in the target organism are desirably identified as the reciprocal best BLAST hits between compared genomes.

[0484] As shown in the figure, the method 400 commences in state 410 wherein one or more comparison genomes and associated information are selected and conserved gene pairs between the comparison organism(s) and the target organism genomic information identified. Conservation is identified, in state 415 wherein gene pairs in the target organism that are both adjacent and in the same orientation are ascertained. Subsequently, in state 420 the identified gene pairs from state 415 are assessed against homologous gene pairs in the comparison organism based on similarities in adjacency and orientation. Conserved gene pairs that are adjacent to one another and in the same orientation in both the target organism and the comparison organism determined according to the aforementioned criteria are then compiled in a table (e.g. hash table) or other data structure in state 425 to reflect conserved gene pairs between the target and comparison organism. These steps are repeated 430 for each comparison organism available to generate additional compilations of conserved genes.

[0485] In state 435, a hashing function is applied to the conserved gene pair data to cluster the data into one or more conserved gene arrays wherein a hash value is associated with gene pairs contained in the table to provide a means for grouping the genes. Subsequently, the conserved gene clusters identified by the hashing analysis 435 may be evaluated in state 440 and ordered by coordinates in the target organism in state 445 to serve as a means for operon prediction.

[0486] As an example of how these operations may proceed, the hashing function and subsequent evaluations and orderings may be performed according to the following steps for each row from the gene pair table/hash table for each selected comparison between the target and comparison organisms:

[0487] For each row in the hash table, the genes for a selected gene pair are retrieved (e.g. gene_{A} and gene_{B}) and the following criteria for generating the associated hash value are applied:
[0488] a) Each entry contained within the table for both genes of the gene pair is initialized with a principal hash value (for example, 0).
[0489] b) If the hash value entries contained within the table for both genes of the gene pair are equivalent to the principal hash value (e.g. the value 0), then these two genes are considered to belong to a new cluster together and these genes may be assigned a discrete cluster number. In one aspect, the hash table entry may be representative of an offset into a cluster array or other data structure that contains the designated cluster value.
[0490] c) If only a single gene of the gene pair possesses a hash value corresponding to the principal hash value, then the hash value corresponding to the selected gene is assigned a value equivalent to that of the other gene pair member.
[0491] d) If both genes of the gene pair possess an identical non-principal hash value, this may be deemed to signify that the same gene pairs have been identified by a prior comparison with another organism and as a consequence this row may be skipped without hash value modification.
[0492] e) If both genes of the gene pair possess a different non-principal hash value, then each occurrence of the greater cluster value may be replaced with the lesser cluster value in the cluster array.
[0493] f) Genes that possess the same hash value in the hash table may be considered to belong to the same conserved gene clusters and these genes may be ordered by their relative coordinates in the target organism genome.

[0494] In one aspect, the rate or frequency of false positives may be moderated by restricting the analysis of gene pairs to those which fall within a desirable range of intergenic distances. For example, an intergenic distance range between approximately 0 and 300 bp may be selected for evaluation of gene pairs contained within the same multi-gene bins.

[0495] Table II illustrates the results of applying the conserved gene cluster analysis method 400 to evaluate an exemplary target organism comprising Staphylococcus aureus relative to other available organisms and their corresponding genomic information. In this table, the values of conserved gene clusters between Staphylococcus aureus and other exemplary genomes are shown wherein 39 total bacterial genomes were used in the analysis which comprised: 14 Gram-positive (G+), 23 Gram-negative (G−), and 2 others organism types. As shown by this data, use of multiple genomes in comparison to the target organism desirably increases the predicted number of conserved gene clusters.

TABLE II
Conserved gene clusters analysis in Staphylococcus aureus when
compared to different bacterial genomes

| | | No. of | | Percent of | Average | Largest |
|---|---|---|---|---|---|---|
| | | Conserved | No. of | Staphylococcus | Cluster | Cluster |
| Organism Compared | Type | Gene Clusters | Genes | aureus Genes | Size | Size |
| Aquifex aeolicus | G− | 27 | 76 | 2.8% | 2.8 | 10 |
| Bacillus halodurans | G+ | 245 | 714 | 26.3% | 2.9 | 23 |
| Bacillus subtilis | G+ | 244 | 722 | 26.6% | 3.0 | 23 |
| Borrelia burgdorferi | Spirochete | 39 | 114 | 4.2% | 2.9 | 22 |
| Buchnera sp. | G− | 40 | 119 | 4.4% | 3.0 | 14 |
| Campylobacter jejuni | G− | 42 | 121 | 4.5% | 2.9 | 19 |
| Caulobacter crescentus | G− | 75 | 190 | 7.0% | 2.5 | 14 |
| Chlamydia pneumoniae | G− | 40 | 101 | 3.7% | 2.5 | 8 |
| Chlamydia trachomatis | G− | 42 | 105 | 3.9% | 2.5 | 8 |
| Clostridium acetobutylicum | G+ | 138 | 384 | 14.1% | 2.8 | 23 |
| Enterococcus faecalis | G+ | 200 | 545 | 20.1% | 2.7 | 23 |
| Escherichia coli | G− | 98 | 249 | 9.2% | 2.5 | 14 |
| Haemophilus influenzae | G− | 74 | 191 | 7.0% | 2.6 | 11 |
| Helicobacter pylori | G− | 29 | 85 | 3.1% | 2.9 | 15 |
| Lactococcus lactis | G+ | 151 | 382 | 14.1% | 2.5 | 15 |
| Listeria innocua | G+ | 238 | 718 | 26.5% | 3.0 | 23 |
| Listeria monocytogenes | G+ | 243 | 732 | 27.0% | 3.0 | 23 |
| Mycobacterium leprae | G+ | 72 | 181 | 6.7% | 2.5 | 11 |
| Mycobacterium tuberculosis | G+ | 84 | 209 | 7.7% | 2.5 | 10 |
| Mycoplasma genitalium | G+ (Acid Fast) | 49 | 139 | 5.1% | 2.8 | 19 |
| Mycoplasma pneumoniae | G+ (Acid Fast) | 51 | 143 | 5.3% | 2.8 | 19 |
| Mycoplasma pulmonis | G+ (Acid Fast) | 51 | 133 | 4.9% | 2.6 | 12 |
| Neisseria meningitidis | G− | 46 | 126 | 4.6% | 2.7 | 13 |
| Pasteurella multocida | G− | 73 | 185 | 6.8% | 2.5 | 14 |
| Pseudomonas aeruginosa | G− | 86 | 222 | 8.2% | 2.6 | 14 |
| Rickettsia conorii | G− | 35 | 97 | 3.6% | 2.8 | 14 |
| Rickettsia prowazekii | G− | 36 | 99 | 3.6% | 2.8 | 14 |
| Salmonella typhi | G− | 91 | 233 | 8.6% | 2.6 | 14 |
| Salmonella typhimurium | G− | 86 | 220 | 8.1% | 2.6 | 14 |
| Sinorhizobium meliloti | G− | 69 | 179 | 6.6% | 2.6 | 14 |
| Streptococcus pneumoniae | G+ | 155 | 369 | 13.6% | 2.6 | 14 |
| Streptococcus pyogenes | G+ | 137 | 396 | 14.6% | 2.7 | 28 |
| Synechocystis sp. | G− | 28 | 84 | 3.1% | 3.0 | 13 |
| Thermotoga maritima | G− | 70 | 192 | 7.1% | 2.7 | 23 |
| Treponema pallidum | Spirochete | 32 | 94 | 3.5% | 2.9 | 19 |
| Ureaplasma urealyticum | G− | 48 | 143 | 5.3% | 3.0 | 19 |
| Vibrio cholerae | G− | 80 | 203 | 7.5% | 2.6 | 14 |
| Xylella fastidiosa | G− | 60 | 163 | 6.0% | 2.7 | 14 |
| Yersinia pestis | G− | 89 | 230 | 8.5% | 2.6 | 14 |

[0496] Referring again to FIG. 2, another consensus analysis model 140 comprises the boundary analysis 115. This method 115 is based upon the detection of signals at transcription unit boundaries which may include identification of promoter and terminator sequences and structures. As will be described in greater detail hereinbelow, software applications familiar to those skilled in the art, including the GCG Wisconsin Package of programs, may be used to aid in boundary analysis or alternatively custom developed searching algorithms or other software applications may be used to perform similar operations to aid in the identification of boundary sequence information. As with other operon predication schemes 110, this method 115 may be used to aid in operon prediction in the target organism and furthermore compliment or supplement other methods used in consensus analysis 140.

[0497] FIG. 5A illustrates an exemplary method 500 for boundary analysis 115 comprising a transcriptional terminator identification approach. Generally, transcription terminators such as Rho-independent transcription terminators possess distinct secondary structures in nascent RNA. Putative terminators from a number of available prokaryotic genomes may be grouped by structure into classes including: L-shaped, I-shaped, V-shaped, U-shaped, and X-shaped. In one aspect, the majority of transcription terminators detected in the target organism may comprise one or more selected classes.

[0498] For example in the case of Staphylococcus aureus, a significant portion of the rho-independent transcription terminators detected comprise L-shaped structures having a stem-loop followed by a poly U-tail. Accordingly, the method 500 commences in state 510 with the identification of one or more classes of transcriptional terminators. The structural characteristics for the selected classes of transcriptional terminators may then be used as a search criterion within the target organism's genomic information in state 520. In various embodiments, searching may be performed using software applications familiar to those skilled in the art, including GCG Terminator, part of the GCG Wisconsin Package of programs.

[0499] In the exemplary target organism, Staphylococcus aureus, searching of the genomic information indicative of putative terminator structure may comprise searching for GC-rich dyad symmetry near a U-rich region. In performing this search, a selected portion of sequence information downstream of each gene's stop codon may be used in the analysis of putative transcriptional terminators. For example, the sequence ranging between approximately −20 bp and 200 bp downstream of each gene's stop codon may be used in the terminator search in state 520.

[0500] Subsequently, in state 530 putative transcriptional terminators may be determined on the basis of identification of expected terminator structure(s). In one aspect, predicted terminators are called and extracted on the basis of exceeding a selected S-value of approximately greater than 0. While a significant number of putative terminators may be located in proximity to the stop codons, other terminators may be located further downstream.

[0501] FIG. 5B illustrates the relative distribution of transcription terminators 550 predicted using the aforementioned methods. As shown in this figure, the predicted transcription terminators have a higher distribution in the sequence range of between approximately 0 bp and 70 bp downstream of the stop codon. However, significant numbers of transcriptional terminators may be predicted further downstream. Consequently, the sequence range searched by the method 500 may be adjusted to modify the stringency of analysis to capture more or less putative transcriptional terminators. In some embodiments, the sequence range may be adjusted to reflect the distribution of stop codons in the target organism.

[0502] While the foregoing approach describes a method 500 by which transcription terminators may be identified, it will be appreciated that other boundary analysis approaches 115 may include analysis of the genomic information for the target organism to include promoter regions as well as terminal region identification. For example, in one exemplary promoter analysis approach, a portion of the sequence upstream of a start codon for one or more operons may be identified as a putative promoter and its orientation evaluated with respect to the orientation of the start codon. Conserved motifs may be further identified using a sequence analysis application such as MEME (Multiple EM for Motif Elicitation) used in conjunction with MotifSearch, both part of the GCG Wisconsin Package. Sequence analysis in this manner may be used to identify conserved motifs in the promoter regions of the genes associated with selected start codons to help identify canonical and promoter elements. Promoter evaluation in this manner may further be used to elucidate operon boundaries and structure in a manner similar to that described above for terminator analysis.

[0503] Returning again to FIG. 2, consensus analysis 140 continues in state 240 wherein the results obtained from one or more of the operon prediction methods are combined and a consensus score is assigned to each gene-pair. As will be appreciated by one of skill in the art, each operon prediction method has its own inherent strengths and by combining the results an investigator may obtain better overall coverage and accuracy in genome-wide operon prediction. For example, the method of intergenic distance analysis 125 provides greater specificity with a relatively short distance cut-off length. Conserved gene cluster analysis 130 provides high specificity with somewhat lower sensitivity when fewer comparison organisms are utilized. Boundary analysis 115 generally provides useful information when available as the identified promoters and terminators are natural signals of operon boundaries.

[0504] As previously indicated it is generally desirable to combine the results obtained from each operon prediction method 110 in a rational manner to improve the predictive quality of the analysis. In one aspect, applying a gene-pair scoring approach 240 provides a means to weight the contribution of the selected operon prediction categories 110 and generate a value representative of the relative degree of confidence that adjacent gene pairs may reside in the same operon. As will be described in greater detail hereinbelow, this manner of operon prediction occurs in state 245 following gene pair scoring 240 to distinguish genes predicted to be associated with polycistronic operons 250 containing more than one gene from genes predicted to be associated with monocistronic operons 235 containing a single gene.

[0505] FIG. 6 illustrates a method 600 for gene pair scoring wherein a numerical score is used to represent the degree of confidence that the genes of a gene pair reside in the same operon. The method 600 commences in state 610 wherein adjacent gene-pairs are identified and subsequently in state 620 a confidence score is associated with each gene pair. In one aspect, the confidence score desirably aids in operon prediction and identification by ranking the likelihood that a selected gene-pair comprises two genes that reside in the same operon. Additional details of one method of scoring selected gene pairs will be described in greater detail hereinbelow.

[0506] Following gene-pair scoring 620, a confidence threshold is selected in state 630 which may be representative of an empirically derived or user-defined value which designates a threshold confidence level used to evaluate each gene pair in state 640 and distinguish paired genes which have a selected degree of probability of residing in the same operon from those genes which have a selected degree of probability of not residing in the same operon. In one aspect, gene-pair scores are evaluated against the selected threshold confidence level and those gene-pairs which do not possess at least a confidence value greater than the threshold confidence level are split. In other words, splitting of the gene-pairs in this manner dissociates gene-pairs whose confidence value suggests the constituent genes contained therein are not part of the same operon.

[0507] As an exemplary application of the confidence scoring method 600 described above, a numerical score of “0” may be indicative a selected gene-pair having genes that are very likely to reside in separate operons. A gene pair with a score of “1” may indicate that the gene of the gene pair may be in the same operon, but the degree of confidence is relatively low. In one aspect, the intersections of such gene pairs may also be construed as potential operon boundaries. A gene pair with a score of “2” may be indicative of the gene having a somewhat likely probably of residing in the same operon. A score of “3” may be indicative of the genes of the gene pair having a relatively high likelihood of residing in the same operon.

[0508] In one aspect, the aforementioned scoring scheme may be roughly translated as reflecting the following levels of confidence in pairwise or adjacent gene multicistron operon identification: “relatively no confidence”, “relatively little confidence”, “some degree of confidence”, and “relatively high confidence”. Similarly, a score of “0” may also be considered to reflect a “relatively high confidence” that two adjacent genes reside in discrete operons. In another aspect, the scoring scheme reflects the following principles: stringent on a score “0” (operon boundaries) and score 3 (operon interior), less stringent on score 1 (potential operon boundaries) and score 2 (probable operon).

[0509] In various embodiments, using the above-indicated scoring range, empirical criteria may be used to establish the boundaries for scoring of individual gene-pairs. An exemplary set of criteria for adjacent gene or pairwise scoring comprises the following:
[0510] a) A score of “0” is assigned to a gene pair if any of the following three criteria are met:
   [0511] I. The two adjacent genes possess different orientations; or the intergenic distance is approximately greater than 300 bp; or the intergenic distance is approximately greater than 100 bp and the number of conserved organisms is approximately equivalent to 0.
[0512] b) A score of “1” is assigned to a gene pair if the following criteria are met:
   [0513] I. The gene pair comprises an intergenic distance approximately greater than 60 bp which is conserved in approximately less than 5 organisms and a predicted terminator exists between the genes of the gene pair.
[0514] c) A score of “3” is assigned to a gene pair if any of the following criteria are met:
   [0515] I. The gene pair is conserved in approximately 10 organisms or more; or the intergenic distance is approximately less than or equal to 30 bp; or if at least two of the following requirements are met:
      [0516] i. The intergenic distance within the gene pair is approximately less than or equivalent to 50 bp; no predicted terminators are identified which correspond to the gene pair; and the relative number of organisms conserved is approximately greater than or equal to 5 but approximately less than 10.
[0517] d) Finally, a score of “2” may be assigned to a gene pair that does not meet any of the above requirements.

[0518] As will be appreciated by one of skill in the art, the foregoing scoring criteria is representative of but one of many possible methods by which scores may be assigned to each gene pair. It is conceived that other scoring systems as well as other criteria or modifications to the criteria presented herein may be applied in a similar manner to achieve a means by which each gene pair may associated with respect to residing within the same operon. As such, alternative scoring systems, modifications to the existing scoring criteria, or the establishment of alternative scoring criteria are considered but other embodiments of the present teachings.

[0519] In one aspect, operon prediction 600 by gene pair scoring 620 and gene-pair splitting 640 may be used to define putative operon boundaries. In various embodiments, operon boundaries may be established by evaluating the scores associated with each gene pair and the resulting splits for gene pairs whose confidence values fall below the confidence threshold. As previously noted, gene pair division on the basis of the confidence threshold may be observed as splitting the genes into distinct operons.

[0520] As an exemplary application of the gene pair splitting approach, division of gene pairs may be performed when the confidence score associated with a selected gene-pair is approximately equal to or below a confidence threshold having a value 0 or 1. According to the exemplified confidence scoring scale, using a confidence threshold of 0 would tend to be more inclusive of gene-pairs to be positively identified in operon prediction whereas a confidence threshold of 1 would tend to be more stringent in operon prediction. In various embodiments, these empirically derived values yield reasonable results; however, it will be appreciated that other confidence threshold cutoffs may be readily used in a manner similar to that described above.

[0521] Table III further illustrates the results of operon prediction for the exemplary organism, Staphylococcus aureus using a confidence threshold selection criteria of 0 or less than or equal to 1 as the maximum threshold. As shown in the table, when using a threshold selection score of 0 as a criterion to break or split the gene pairs, a total of approximately 864 monocistrons and 533 polycistrons may be identified. Of these different operon types, approximately 80% of gene pairs in the approximately 533 polycistrons possessed a confidence score of 3. Furthermore, approximately 60% of the polycistrons have an average score of 3, suggesting that the majority of the gene pairs in these polycistrons may be identified as having a high confidence of proper operon identification. Additionally, only a relatively small number of polycistrons possess one or more gene pairs with a confidence score of 1.

[0522] In one aspect, a confidence threshold of 0 is desirably selected to generate a relatively large percentage of operon predictions with gene pairs possessing scores of 1 to 3 being flagged or identified to indicate their confidence values. Confidence value flagging in this manner may aid in experimental design and also provides a means to not only be able to predict the largest transcription unit within a specified region, but also to predict other potential smaller transcription units in approximately the same region.

TABLE III
Operon prediction based on threshold
selection using gene-pair scoring

| | threshold = 0 | threshold <= 1 |
|---|---|---|
| # of total predicted operons | 1397 | 1459 |
| # of moncistronic operons | 864 | 921 |
| # of polycistronic operons | 533 | 538 |
| # of polycistronic operons | 53 | 0 |
| with minimum gene pair score = 1 | | |
| # of polycistronic operons | 160 | 162 |
| with minimum gene pair score = 2 | | |
| # of polycistronic operons | 320 | 376 |
| with every gene pair score = 3 | | |

Examples of Improved Operon Prediction in Staphylococcus aureus

[0524] One significant feature of the present teachings is that through consensus analysis wherein various operon prediction methods are integrated, prediction of operons is improved and operons can be identified in instances where they might be otherwise missed when using conventional singular approaches.

[0525] For example, as will be described in greater detail hereinbelow in connection with Example 7, using the methods described herein, it can be readily predicted that dnaA and dnaN reside in the same operon in Staphylococcus aureus with high confidence despite the relatively large intergenic distance. In one aspect, such a prediction is achieved by the observation that this gene pair is relatively highly conserved in the genomes to which Staphylococcus aureus may be compared.

[0526] As another example, using the operon prediction methods described herein, the genes SAV1419, murG and SAV1417 may be predicted to reside in the same operon with a relatively high degree of confidence due in part to their relatively short intergenic distance (approximately. 12 bp and 17 bp, respectively) and lack of identified terminators. In conventional operon prediction methods employing solely comparative genomics or grouping by functions, this operon might not be predicted.

[0527] It will be appreciated that operon organization is an important aspect of prokaryotic genome annotation and that by using an integrated approach which may include a combined analysis by gene orientation, distance, conserved gene clusters, and transcription terminator identification; operon prediction power can be improved over conventional identification techniques. Use of the gene-pair scoring scheme further improves the flexibility of operon identification by allowing the stringency of analysis to be modified to be more “inclusive” or “exclusive”. One desirable feature of the present teachings is that these methods do not substantially rely on experimental data and thus provide a means to predict operons in genomes where training data are not easily accessible or available.

[0528] Assignment of Essential Genes within an Operon

[0529] In one embodiment of the present invention, the methods described herein are used to predict the boundaries of an operon containing at least one proliferation-required gene and then the operon is dissected to determine which gene or genes in the operon are required for proliferation. A number of techniques that are, well known in the art can be used to dissect the operon. For example, analysis of RNA transcripts by Northern blot or primer extension techniques are commonly used to analyze operon transcripts. In one aspect of this embodiment, gene disruption by homologous recombination is used to individually inactivate the genes of an operon that is thought to contain a gene required for proliferation.

[0530] Several gene disruption techniques have been described for the replacement of a functional gene with a mutated, non-functional (null) allele. These techniques generally involve the use of homologous recombination. One technique using homologous recombination in Staphylococcus aureus is described in Xia et al. 1999, Plasmid 42: 144-149, the disclosure of which is incorporated herein by reference in its entirety. This technique uses crossover PCR to create a null allele with an in-frame deletion of the coding region of a target gene. The null allele is constructed in such a way that nucleotide sequences adjacent to the wild type gene are retained. These homologous sequences surrounding the deletion null allele provide targets for homologous recombination so that the wild type gene on the Staphylococcus aureus chromosome can be replaced by the constructed null allele. This method can be used with other bacteria as well, including Escherichia coli, Salmonella and Klebsiella species. Similar gene disruption methods that employ the counter selectable marker sacB (Schweizer, H. P., Klassen, T. and Hoang, T. (1996) Mol. Biol. of Pseudomonas. ASM press, 229-237, the disclosure of which is incorporated herein by reference in its entirety) are available for Pseudomonas, Salmonella and Klebsiella species. Enterococcus faecalis genes can be disrupted by recombining in a non-replicating plasmid that contains an internal fragment to that gene (Leboeuf, C., L. Leblanc, Y. Auffray and A. Hartke. 2000. J. Bacteriol. 182:5799-5806, the disclosure of which is incorporated herein by reference in its entirety).

[0531] The crossover PCR amplification product is subcloned into a suitable vector having a selectable marker, such as a drug resistance marker. In some embodiments the vector may have an origin of replication which is functional in Escherichia coli or another organism distinct from the organism in which homologous recombination is to occur, allowing the plasmid to be grown in Escherichia coli or the organism other than that in which homologous recombination is to occur, but may lack an origin of replication functional in Acinetobacter baumannii, Anaplasma marginale, Bacillus anthracis, Bacteroides fragilis, Bordetella pertussis, Borrelia burgdorferi, Brucella abortus, Brucella melitensis, Burkholderia cepacia, Burkholderia fungorum, Burkholderia mallei, Campylobacter jejuni, Chlamydia pneumoniae, Chlamydia trachomatis, Clostridium acetobutylicum, Clostridium botulinum, Clostridium difficile, Clostridium perfringens, Corynebacterium diptheriae, Coxiella burnetii, Enterobacter cloacae, Enterococcus faecalis, Enterococcus faecium, Escherichia coli, Francisella tularensis, Haemophilus influenzae, Helicobacter pylori, Klebsiella pneumoniae, Legionella pneumophila, Listeria monocytogenes, Moraxella catarrhalis, Mycobacterium avium, Mycobacterium bovis, Mycobacterium leprae, Mycobacterium tuberculosis, Mycoplasma genitalium, Mycoplasma pneumoniae, Neisseria gonorrhoeae, Neisseria meningitidis, Nocardia asteroides, Pasteurella haemolytica, Pasteurella multocida, Proteus mirabilis, Proteus vulgaris, Pseudomonas aeruginosa, Pseudomonas putida, Pseudomonas syringae, Rickettsia rickettsii, Rochalimaea quintana, Salmonella bongori, Salmonella cholerasuis, Salmonella enterica, Salmonella paratyphi, Salmonella typhi, Salmonella typhimurium, Shigella boydii, Shigella dysenteriae, Shigella flexneri, Shigella sonnei, Staphylococcus aureus, Staphylococcus epidermidis, Staphylococcus haemolyticus, Streptococcus pneumoniae, Streptococcus mutans, Streptococcus pyogenes, Treponema pallidum, Ureaplasma urealyticum, Vibrio cholerae, Vibrio parahaemolyticus, Vibrio vulnificans, Yersinia enterocolitica, Yersinia pestis or any species falling within the genera of any of the above species such that selection of the selectable marker requires integration of the vector into the homologous region of the Acinetobacter baumannii, Anaplasma marginale, Bacillus anthracis, Bacteroides fragilis, Bordetella pertussis, Borrelia burgdorferi, Brucella abortus, Brucella melitensis, Burkholderia cepacia, Burkholderia fungorum, Burkholderia mallei, Campylobacter jejuni, Chlamydia pneumoniae, Chlamydia trachomatis, Clostridium acetobutylicum, Clostridium botulinum, Clostridium difficile, Clostridium perfringens, Corynebacterium diptheriae, Coxiella burnetii, Enterobacter cloacae, Enterococcus faecalis, Enterococcus faecium, Escherichia coli, Francisella tularensis, Haemophilus influenzae, Helicobacter pylori, Klebsiella pneumoniae, Legionella pneumophila, Listeria monocytogenes, Moraxella catarrhalis, Mycobacterium avium, Mycobacterium bovis, Mycobacterium leprae, Mycobacterium tuberculosis, Mycoplasma genitalium, Mycoplasma pneumoniae, Neisseria gonorrhoeae, Neisseria meningitidis, Nocardia asteroides, Pasteurella haemolytica, Pasteurella multocida, Proteus mirabilis, Proteus vulgaris, Pseudomonas aeruginosa, Pseudomonas putida, Pseudomonas syringae, Rickettsia rickettsii, Rochalimaea quintana, Salmonella bongori, Salmonella cholerasuis, Salmonella enterica, Salmonella paratyphi, Salmonella typhi, Salmonella typhimurium, Shigella boydii, Shigella dysenteriae, Shigella flexneri, Shigella sonnei, Staphylococcus aureus, Staphylococcus epidermidis, Staphylococcus haemolyticus, Streptococcus pneumoniae, Streptococcus mutans, Streptococcus pyogenes, Treponema pallidum, Ureaplasma urealyticum, Vibrio cholerae, Vibrio parahaemolyticus, Vibrio vulnificans, Yersinia enterocolitica, Yersinia pestis or any species falling within the genera of any of the above species chromosome. Usually a single crossover event is responsible for this integration event such that the Acinetobacter baumannii, Anaplasma marginale, Bacillus anthracis, Bacteroides fragilis, Bordetella pertussis, Borrelia burgdorferi, Brucella abortus, Brucella melitensis, Burkholderia cepacia, Burkholderia fungorum, Burkholderia mallei, Campylobacter jejuni, Chlamydia pneumoniae, Chlamydia trachomatis, Clostridium acetobutylicum, Clostridium botulinum, Clostridium difficile, Clostridium perfringens, Corynebacterium diptheriae, Coxiella burnetii, Enterobacter cloacae, Enterococcus faecalis, Enterococcus faecium, Escherichia coli, Francisella tularensis, Haemophilus influenzae, Helicobacter pylori, Klebsiella pneumoniae, Legionella pneumophila, Listeria monocytogenes, Moraxella catarrhalis, Mycobacterium avium, Mycobacterium bovis, Mycobacterium leprae, Mycobacterium tuberculosis, Mycoplasma genitalium, Mycoplasma pneumoniae, Neisseria gonorrhoeae, Neisseria meningitidis, Nocardia asteroides, Pasteurella haemolytica, Pasteurella multocida, Proteus mirabilis, Proteus vulgaris, Pseudomonas aeruginosa, Pseudomonas putida, Pseudomonas syringae, Rickettsia rickettsii, Rochalimaea quintana, Salmonella bongori, Salmonella cholerasuis, Salmonella enterica, Salmonella paratyphi, Salmonella typhi, Salmonella typhimurium, Shigella boydii, Shigella dysenteriae, Shigella flexneri, Shigella sonnei, Staphylococcus aureus, Staphylococcus epidermidis, Staphylococcus haemolyticus, Streptococcus pneumoniae, Streptococcus mutans, Streptococcus pyogenes, Treponema pallidum, Ureaplasma urealyticum, Vibrio cholerae, Vibrio parahaemolyticus, Vibrio vulnificans, Yersinia enterocolitica, Yersinia pestis or any species falling within the genera of any of the above species chromosome now contains a tandem duplication of the target gene consisting of one wild type allele and one deletion null allele separated by vector sequence. Subsequent resolution of the duplication results in both removal of the vector sequence and either restoration of the wild type gene or replacement by the in-frame deletion. The latter outcome will not occur if the gene should prove essential. A more detailed description of this method is provided in the Examples below. It will be appreciated that this method may be practiced with any of the nucleic acids or organisms described herein.

[0532] Vectors, Promoters and Host Cells

[0533] Other aspects of the present invention relate to vectors that comprise a promoter which is operably linked to an operon that is identified using an operon prediction method described herein or to a nucleotide sequence complementary to all or a portion of an operon identified using an operon prediction method described herein. In some embodiments, the operon comprises a nucleic acid having a nucleotide sequence selected from a group consisting of SEQ ID NOs: 1-194. Each of the nucleotide sequences of SEQ ID NOs: 1-194 are Staphylococcus aureus operons that were predicted using the operon prediction method described herein. Furthermore, each of these operons comprise at least one gene that has been identified to be required for proliferation.

[0534] It will be appreciated that a vector which comprises an operon as described herein can be constructed from any vector into which exogenous nucleic acid can be inserted. With respect to a vector “exogenous nucleic acid” refers to any nucleic acid that is not part of the original vector. In some embodiments, the operons are inserted into cloning vectors, sequencing vectors, shuttle vectors, transfer vectors, suicide vectors or expression vectors. The vector may be a vector which replicates extrachromosomally or a vector which integrates into the chromosome. For example, the vector may be a pBR322 based vector or a bacteriophage based vector such as P1 or lambda. In other embodiments, the vectors can replicate in one or more of the microbes selected from the group consisting of Acinetobacter baumannii, Anaplasma marginale, Bacillus anthracis, Bacteroides fragilis, Bordetella pertussis, Borrelia burgdorferi, Brucella abortus, Brucella melitensis, Burkholderia cepacia, Burkholderia fungorum, Burkholderia mallei, Campylobacter jejuni, Chlamydia pneumoniae, Chlamydia trachomatis, Clostridium acetobutylicum, Clostridium botulinum, Clostridium difficile, Clostridium perfringens, Corynebacterium diptheriae, Coxiella burnetii, Enterobacter cloacae, Enterococcus faecalis, Enterococcus faecium, Escherichia coli, Francisella tularensis, Haemophilus influenzae, Helicobacter pylori, Klebsiella pneumoniae, Legionella pneumophila, Listeria monocytogenes, Moraxella catarrhalis, Mycobacterium avium, Mycobacterium bovis, Mycobacterium leprae, Mycobacterium tuberculosis, Mycoplasma genitalium, Mycoplasma pneumoniae, Neisseria gonorrhoeae, Neisseria meningitidis, Nocardia asteroides, Pasteurella haemolytica, Pasteurella multocida, Proteus mirabilis, Proteus vulgaris, Pseudomonas aeruginosa, Pseudomonas putida, Pseudomonas syringae, Rickettsia rickettsii, Rochalimaea quintana, Salmonella bongori, Salmonella cholerasuis, Salmonella enterica, Salmonella paratyphi, Salmonella typhi, Salmonella typhimurium, Shigella boydii, Shigella dysenteriae, Shigella flexneri, Shigella sonnei, Staphylococcus aureus, Staphylococcus epidermidis, Staphylococcus haemolyticus, Streptococcus pneumoniae, Streptococcus mutans, Streptococcus pyogenes, Treponema pallidum, Ureaplasma urealyticum, Vibrio cholerae, Vibrio parahaemolyticus, Vibrio vulnificans, Yersinia enterocolitica, Yersinia pestis and any species falling within the genera of any of the above species.

[0535] In some embodiments of the present invention, the vector comprises a promoter that is operably linked to an operon comprising a nucleic acid having a nucleotide sequence selected from the group consisting of SEQ ID NOs: 1-194 or to a nucleotide sequence complementary to all or a portion of the operon. A number of promoters are known in the art and have been previously described. The promoters used to construct the operon containing vectors described herein can be relatively strong promoters, promoters which possess a moderate level of activity, or relatively weak promoters. Additionally, the promoters can be either constitutive or regulatable promoters.

[0536] The promoter to which the operon is linked should be active in the bacterium in which the gene products are to be expressed. For example, the operon can be operably linked to the SP6 promoter, T3 promoter, trc promoter, lac promoter, temperature regulated lambda promoters, the Bacillus aprE and nprE promoters (U.S. Pat. No. 5,387,521), the bacteriophage lambda P_{L} and P_{R} promoters (Renaut, et al., (1981) Gene 15: 81) the trp promoter (Russell, et al., (1982) Gene 20: 23), the tac promoter (de Boer et al., (1983) Proc. Natl. Acad. Sci. USA 80: 21), B. subtilis alkaline protease promoter (Stahl et al, (1984) J. Bacteriol. 158, 411-418) alpha amylase promoter of B. subtilis (Yang et al., (1983) Nucleic Acids Res. 11, 237-249) or B. amyloliquefaciens (Tarkinen, et al, (1983) J. Biol. Chem. 258, 1007-1013), the neutral protease promoter from B. subtilis (Yang et al, (1984) J. Bacteriol. 160, 15-21), T7 RNA polymerase promoter (Studier and Moffatt (1986) J Mol Biol. 189(1):113-30), B. subtilis xyl promoter or mutant tetR promoter active in bacilli (Geissendorfer & Hillen (1990) Appl. Microbiol. Biotechnol. 33:657-663), Staphylococcal enterotoxin D promoter (Zhang and Stewart (2000) J. Bacteriol. 182(8):2321-5), cap8 operon promoter from Staphylococcus aureus (Ouyang et al., (1999) J. Bacteriol. 181(8):2492-500), the lactococcal nisA promoter (Eichenbaum (1998) Appl Environ Microbiol. 64(8):2763-9), promoters from in Acholeplasma laidlawii (Jarhede et al., (1995) Microbiology 141 (Pt 9):2071-9), porA promoter of Neisseria meningitidis (Sawaya et al., (1999) Gene 233:49-57), the fbpA promoter of Neisseria gonorrhoeae (Fomg et al., (1997) J. Bacteriol. 179:3047-3052), Corynebacterium diphtheriae toxin gene promoter (Schmitt and Holmes (1994) J. Bacteriol. 176(4):1141-9), the hasA operon promoter from Group A Streptococci (Alberti et al., (1998) Mol Microbiol 28(2):343-53), the rpoS promoter of Pseudomonas putida (Kojic and Venturi (2001) J. Bacteriol. 183:3712-3720), the Acinetobacter baumannii phosphate regulated ppk gene promoter (Gavigan et al., Microbiology 145:2931-7 (1999)); the Acinetobacter baumannii adhC1 promoter which is induced under iron limitation and repressed when the cells are cultured in the presence of free inorganic iron (Echenique et al., Microbiology 147:2805-15 (2001)); the flaB promoter of pGK12 active in Borrelia burgdorferi(Sartakova et al., Proc Natl Acad Sci U S A. 97(9):4850-5 (2000)); the use of Ptrc promoter results in strong inducer-dependent expression in Burkholderia spp (Santos et al., FEMS Microbiol Lett 195(1):91-6 (2001)); the iron regulated sodA promoter of Bordetella pertussis (Graeff-Wohlleben et al., J Bacteriol 179(7):2194-201 (1997)); UV-inducible bcn and uviAB promoters in Clostrdia spp (Garnier and Cole Mol Microbiol 2(5):607-14 (1988)); the heat-inducible clpB promoter of Campylobacter jejuni (Thies et al., Gene 230(1):61-7 (1999)); promoters carrying bacteriophage C1 operator sites in Klebsiella pneumoniae (Schoefield et al, J Bacteriol 183(23):6947-50 (2001)); the Proteus mirabilis ureR promoter (Poore et al., J Bacteriol 183(15):4526-35 (2001)); and the heat-inducible groESL promoter in Listeria monocytogenes, and the IPTG inducible promoter in pLEX5BA (Krause et al., J. Mol. Biol. 274: 365 (1997). In another embodiment, which is useful in Staphylococcus aureus, the promoter is a novel inducible promoter system, XylT5, comprising a modified T5 promoter fused to the xylO operator from the xylA promoter of Staphylococcus aureus. This promoter is described in U.S. patent application Ser. No. 10/032,393, entitled BACTERIAL PROMOTERS AND METHODS OF USE, filed Dec. 21, 2001, the disclosure of which is incorporated herein by reference in its entirety. In another embodiment the promoter may be a two-component inducible promoter system in which the T7 RNA polymerase gene is integrated on the chromosome and is regulated by lacUV5/lacO (Brunschwig, E. and Darzins, A. 1992. Gene 111:35-41, the disclosure of which is incorporated herein by reference in its entirety) and a T7 gene 10 promoter, which is transcribed by T7 RNA polymerase, is fused with a lacO operator. In another embodiment the promoter may be the promoters from the plasmids pEPEF3 or pEPEF14, which harbor xylose inducible promoters functional in E. faecalis, described in U.S. patent application Ser. No. 10/032,393, entitled BACTERIAL PROMOTERS AND METHODS OF USE, filed Dec. 21, 2001, the disclosure of which is incorporated herein by reference in its entirety. Other promoters which may be used are familiar to those skilled in the art. It will appreciated that other combinations of organisms and promoters may also be used in the present invention.

[0537] A skilled artisan will appreciate that an vector which comprises an operon as described herein or a nucleotide sequence complementary to all or a portion of the operon can be created for use in any cell by providing a vector which includes features necessary for maintenance in the selected cell type. Such features can include, but are not limited to, origins of replication, resistance genes, repressor genes, ribosomal binding sequences, termination sequences, as well other features. To construct an appropriate vector to provide for replication and/or expression of the operon sequence, one of ordinary skill in the art would know to use standard molecular biology techniques to isolate vectors containing the sequences of interest from cultured bacterial cells, isolate and purify those sequences, and subclone those sequences into a vector adapted for use in the selected species of bacteria.

[0538] Methods of Inhibiting Proliferation

[0539] Embodiments of the present invention also relate to method of inhibiting cellular proliferation by inhibiting the activity or reducing the amount of a proliferation-required gene product contained in a proliferation-required operon. In one embodiment of the present invention, an antisense nucleic acid that is complementary to at least a portion of a proliferation-required operon identified using the operon prediction methods described herein is provided to a cell thereby inhibiting proliferation of the cell. In another embodiment of the present invention, an antisense nucleic acid that is complementary to at least a portion of an operon comprising a nucleotide sequence selected from the group consisting of SEQ ID NOs: 1-194, wherein the portion does not include a nucleotide sequence selected from the group consisting of SEQ ID NOs: 201-550 is provided to a cell thereby inhibiting proliferation of the cell. Methods of inhibiting cellular proliferation can be performed in one or more of the microbes selected from the group consisting of Acinetobacter baumannii, Anaplasma marginale, Bacillus anthracis, Bacteroides fragilis, Bordetella pertussis, Borrelia burgdorferi, Brucella abortus, Brucella melitensis, Burkholderia cepacia, Burkholderia fungorum, Burkholderia mallei, Campylobacter jejuni, Chlamydia pneumoniae, Chlamydia trachomatis, Clostridium acetobutylicum, Clostridium botulinum, Clostridium difficile, Clostridium perfringens, Corynebacterium diptheriae, Coxiella burnetii, Enterobacter cloacae, Enterococcus faecalis, Enterococcus faecium, Escherichia coli, Francisella tularensis, Haemophilus influenzae, Helicobacter pylori, Klebsiella pneumoniae, Legionella pneumophila, Listeria monocytogenes, Moraxella catarrhalis, Mycobacterium avium, Mycobacterium bovis, Mycobacterium leprae, Mycobacterium tuberculosis, Mycoplasma genitalium, Mycoplasma pneumoniae, Neisseria gonorrhoeae, Neisseria meningitidis, Nocardia asteroides, Pasteurella haemolytica, Pasteurella multocida, Proteus mirabilis, Proteus vulgaris, Pseudomonas aeruginosa, Pseudomonas putida, Pseudomonas syringae, Rickettsia rickettsii, Rochalimaea quintana, Salmonella bongori, Salmonella cholerasuis, Salmonella enterica, Salmonella paratyphi, Salmonella typhi, Salmonella typhimurium, Shigella boydii, Shigella dysenteriae, Shigella flexneri, Shigella sonnei, Staphylococcus aureus, Staphylococcus epidermidis, Staphylococcus haemolyticus, Streptococcus pneumoniae, Streptococcus mutans, Streptococcus pyogenes, Treponema pallidum, Ureaplasma urealyticum, Vibrio cholerae, Vibrio parahaemolyticus, Vibrio vulnificans, Yersinia enterocolitica, Yersinia pestis and any species falling within the genera of any of the above species.

[0540] In one exemplary method of inhibiting proliferation, the antisense nucleic acid is provided directly to the cell. Methods for providing antisense nucleic acids directly to a cell are well known in the art. For example, methods such as transformation and electroporation can be used to introduce the antisense nucleic acids into the cell. The proliferation-inhibiting antisense nucleic acids that are provided directly to the cell can be comprised of RNA, DNA, modified polynucleotides or analogs thereof. For example, an antisense nucleic acid can be modified to increase its stability using methods commonly known in the art. Modified nucleic acids can include modifications to one or more nucleotide bases, to one or more sugar molecules or to the phosphate backbone of the nucleic acid. Alternatively, stabilized antisense nucleic acid analogs can be synthesized from peptide nucleic acid (PNA). Methods of producing modified antisense nucleic acids that are stabilized and methods of producing PNA analogs are described further in the Examples below.

[0541] In another exemplary method of inhibiting proliferation, a antisense nucleic acid that is complementary to at least a portion of a proliferation-required operon can be introduced into a vector under the control of a promoter. The vector is then transformed into the cell wherein an antisense transcript is produced. Because the antisense transcript is complementary to at least a portion of an operon that is required for proliferation, expression of the antisense transcript results in an inhibition of cellular proliferation. In another embodiment of the present invention, an antisense nucleic acid that is complementary to at least a portion of a proliferation-required operon comprising a nucleotide sequence selected from the group consisting of SEQ ID NOs: 1-194, wherein the portion does not include a nucleotide sequence selected from the group consisting of SEQ ID NOs: 201-550 can be expressed from a vector so as to inhibit cellular proliferation. In particular, the antisense nucleic acid is introduced into a vector under the control of a promoter. The vector is then transformed into the cell wherein an antisense transcript is produced. In some embodiments, the promoter which controls expression of the antisense nucleic acid is constitutive. In other embodiments, the promoter which controls expression of the antisense nucleic acid is regulatable. When a cell containing a vector comprising an antisense nucleic acid under the control of a regulatable promoter is grown under appropriate conditions, such as media containing an inducer of transcription or an agent which alleviates repression of transcription, the antisense transcript is expressed in the cell, thereby reducing the level or activity of the gene product within the cell. In some embodiments, the concentration of the inducer of transcription or the agent which alleviates repression of transcription may be varied to provide optimal results.

[0542] Several promoters that can be used in the construction of vectors that are used to implement the above-described methods for inhibiting proliferation. For example, the antisense nucleic acid can be operably linked to the SP6 promoter, T3 promoter, trc promoter, lac promoter, temperature regulated lambda promoters, the Bacillus aprE and nprE promoters (U.S. Pat. No. 5,387,521), the bacteriophage lambda P_{L} and P_{R} promoters (Renaut, et al., (1981) Gene 15: 81) the trp promoter (Russell, et al., (1982) Gene 20: 23), the tac promoter (de Boer et al., (1983) Proc. Natl. Acad. Sci. USA 80: 21), B. subtilis alkaline protease promoter (Stahl et al, (1984) J. Bacteriol. 158, 411-418) alpha amylase promoter of B. subtilis (Yang et al., (1983) Nucleic Acids Res. 11, 237-249) or B. amyloliquefaciens (Tarkinen, et al, (1983) J. Biol. Chem. 258, 1007-1013), the neutral protease promoter from B. subtilis (Yang et al, (1984) J. Bacteriol. 160, 15-21), T7 RNA polymerase promoter (Studier and Moffatt (1986) J Mol Biol. 189(1):113-30), B. subtilis xyl promoter or mutant tetR promoter active in bacilli (Geissendorfer & Hillen (1990) Appl. Microbiol. Biotechnol. 33:657-663), Staphylococcal enterotoxin D promoter (Zhang and Stewart (2000) J. Bacteriol. 182(8):2321-5), cap8 operon promoter from Staphylococcus aureus (Ouyang et al., (1999) J. Bacteriol. 181(8):2492-500), the lactococcal nisA promoter (Eichenbaum (1998) Appl Environ Microbiol. 64(8):2763-9), promoters from in Acholeplasma laidlawii (Jarhede et al., (1995) Microbiology 141 ( Pt 9):2071-9), porA promoter of Neisseria meningitidis (Sawaya et al., (1999) Gene 233:49-57), the fbpA promoter of Neisseria gonorrhoeae (Forng et al., (1997) J. Bacteriol. 179:3047-3052), Corynebacterium diphtheriae toxin gene promoter (Schmitt and Holmes (1994) J. Bacteriol. 176(4):1141-9), the hasA operon promoter from Group A Streptococci (Alberti et al., (1998) Mol Microbiol 28(2):343-53), the rpoS promoter of Pseudomonas putida (Kojic and Venturi (2001) J. Bacteriol. 183:3712-3720), the Acinetobacter baumannii phosphate regulated ppk gene promoter (Gavigan et al., Microbiology 145:2931-7 (1999)); the Acinetobacter baumannii adhC1 promoter which is induced under iron limitation and repressed when the cells are cultured in the presence of free inorganic iron (Echenique et al., Microbiology 147:2805-15 (2001)); the flaB promoter of pGK12 active in Borrelia burgdorferi (Sartakova et al., Proc Natl Acad Sci U S A. 97(9):4850-5 (2000)); the use of Ptrc promoter results in strong inducer-dependent expression in Burkholderia spp (Santos et al., FEMS Microbiol Lett 195(1):91-6 (2001)); the iron regulated sodA promoter of Bordetella pertussis (Graeff-Wohlleben et al., J Bacteriol 179(7):2194-201 (1997)); UV-inducible bcn and uviAB promoters in Clostrdia spp (Garnier and Cole Mol Microbiol 2(5):607-14 (1988)); the heat-inducible clpB promoter of Campylobacter jejuni (Thies et al., Gene 230(1):61-7 (1999)); promoters carrying bacteriophage C1 operator sites in Klebsiella pneumoniae (Schoefield et al, J Bacteriol 183(23):6947-50 (2001)); the Proteus mirabilis ureR promoter (Poore et al., J Bacteriol 183(15):4526-35 (2001)); and the heat-inducible groESL promoter in Listeria monocytogenes, and the IPTG inducible promoter in pLEX5BA (Krause et al., J. Mol. Biol. 274: 365 (1997). In another embodiment, which may be useful in Staphylococcus aureus, the promoter is a novel inducible promoter system, XylT5, comprising a modified T5 promoter fused to the xylO operator from the xylA promoter of Staphylococcus aureus. This promoter is described in U.S. patent application Ser. No. 10/032,393, entitled BACTERIAL PROMOTERS AND METHODS OF USE, filed Dec. 21, 2001, the disclosure of which is incorporated herein by reference in its entirety. In another embodiment the promoter may be a two-component inducible promoter system in which the T7 RNA polymerase gene is integrated on the chromosome and is regulated by lacUV5/lacO (Brunschwig, E. and Darzins, A. 1992. Gene 111:35-41, the disclosure of which is incorporated herein by reference in its entirety) and a T7 gene 10 promoter, which is transcribed by T7 RNA polymerase, is fused with a lacO operator. In another embodiment the promoter may be the promoters from the plasmids pEPEF3 or pEPEF14, which harbor xylose inducible promoters functional in E. faecalis, described in U.S. patent application Ser. No. 10/032,393, entitled BACTERIAL PROMOTERS AND METHODS OF USE, filed Dec. 21, 2001, the disclosure of which is incorporated herein by reference in its entirety. Other promoters which may be used are familiar to those skilled in the art. It will appreciated that other combinations of organisms and promoters may also be used in the present invention.

[0543] Expression vectors for a variety of species are known in the art. For example, numerous vectors which function in Escherichia coli are known. Also, Pla et al. have reported an expression vector that is functional in a number of relevant hosts including: Salmonella typhimurium, Pseudomonas putida, and Pseudomonas aeruginosa. J. Bacteriol. 172(8):4448-55 (1990), the disclosure of which is incorporated herein by reference in its entirety. Brunschwig and Darzins (Gene (1992) 111:35-4, the disclosure of which is incorporated herein by reference in its entirety) described a shuttle expression vector for Pseudomonas aeruginosa. Vectors useful for the production of stabilized mRNA having an increased lifetime (including antisense RNA) in Gram negative organisms are described in U.S. patent application No. 10/327592, entitled STABILIZED NUCLEIC ACIDS IN GENE AND DRUG DISCOVERY AND METHODS OF USE, filed Dec. 20, 2002, the disclosure of which is incorporated herein by reference in its entirety. Similarly many examples exist of expression vectors that are freely transferable among various Gram positive microorganisms. Expression vectors for Enterococcus faecalis may be engineered by incorporating suitable promoters into a pAK80 backbone (Israelsen, H., S. M. Madsen, A. Vrang, E. B. Hansen and E. Johansen. 1995. Appl. Environ. Microbiol. 61:2540-2547, the disclosure of which is incorporated herein by reference in its entirety). A number of vectors useful for nucleic acid expression (including antisense nucleic acid expression) in Enterococcus faecalis, Staphylococcus areus as well as other Gram positive organisms are described in U.S. patent application Ser. No. 10/032,393, entitled BACTERIAL PROMOTERS AND METHODS OF USE, filed Dec. 21, 2001, the disclosure of which is incorporated herein by reference in its entirety.

[0544] In some embodiments of the present invention, an antisense nucleic acid that is complementary to at least a portion a proliferation-required operon is inserted into a vector that is used for the production of stabilized mRNA having an increased lifetime in Gram negative organisms. Such vectors are described in U.S. patent application Ser. No. 10/327592, entitled STABILIZED NUCLEIC ACIDS IN GENE AND DRUG DISCOVERY AND METHODS OF USE, filed Dec. 20, 2002, the disclosure of which is incorporated herein by reference in its entirety. Briefly, the antisense RNA which is produced from such expression vectors comprises at least one stem loop flanking each end of the antisense nucleic acid. In some versions of the vector, the at least one stem-loop structure formed at the 5′ end of the stabilized antisense nucleic acid comprises a flush, double stranded 5′ end. In other versions, one or more of the stem loops comprises a rho independent terminator. Further versions of the vectors permits transcription of a stabilized antisense RNA which lacks a ribosome binding site, which lacks sites that are cleaved by one or more RNAses, such as RNAse E or RNAse III, or which lacks both a ribosomal binding site and RNAse cleavage sites.

[0545] It will be appreciated by one of ordinary skill in the art, vectors may contain certain elements that are species specific. These elements can include promoter sequences, operator sequences, repressor genes, origins of replication, ribosomal binding sequences, termination sequences, and others. To generate a vector for the expression of any antisense nucleic acid which has been described above in any desired bacterial species, one of ordinary skill in the art would know to use standard molecular biology techniques to isolate vectors containing the sequences of interest from cultured bacterial cells, isolate and purify those sequences, and subclone those sequences into a vector adapted for use in the species of bacteria wherein proliferation is to be inhibited.

[0546] In addition to the above-described methods of inhibiting proliferation by providing an antisense nucleic acid that is complementary to at least a portion of a proliferation-required operon, some embodiments of the present invention contemplate inhibiting cellular proliferation by replacing the native promoter of an essential operon with a regulatable promoter. Alternatively, a regulatory element can be inserted in or near the native promoter of an essential operon thereby making the expression of genes encoded by the proliferation-required operon regulatable. Both promoter replacement and regulatory element insertion methods are described above in connection with the identification of proliferation-required genes.

[0547] Methods of Identifying Compounds that Inhibit Proliferation

[0548] The methods described above for inhibiting cellular proliferation by inhibiting the activity or reducing the amount of one or more proliferation-required gene products encoded by one or more genes contained in a proliferation-required operon identified using the methods described herein can be used to screen libraries of compounds, such as combinatorial chemical libraries and natural product libraries, to identify compounds that inhibit cellular proliferation. Methods of constructing combinatorial chemical libraries and natural product libraries is well known in the art.

[0549] In one embodiment of the present invention, a cell that has been sensitized by providing an antisense nucleic acid that is complementary to at least a portion of a proliferation-required operon which has been identified using the operon prediction methods described herein is contacted with one or more candidate compounds from a small molecule library. In another embodiment of the present invention, a cell that has been sensitized by providing an antisense nucleic acid that is complementary to at least a portion of a proliferation-required operon comprising a nucleotide sequence selected from the group consisting of SEQ ID NOs.: 1-194 is contacted with one or more candidate compounds from a small molecule library. In other embodiments, the antisense nucleic acid that is used to produce a sensitized cell is complementary to at least a portion of a proliferation-required operon comprising a nucleotide sequence selected from the group consisting of SEQ ID NOs.: 1-194, wherein the portion does not include a nucleotide sequence selected from the group consisting of SEQ ID NOs.: 201-550. Candidate compounds which further inhibit the proliferation of the sensitized cell may be identified as possessing inhibitory activity against one or more gene products encoded by the proliferation-required operon. Methods which can be used to sensitize cells by providing an antisense nucleic acid that is complementary to at least a portion of a proliferation-required operon have been described above in connection with methods of inhibiting cellular proliferation.

[0550] In some embodiments of the present invention, a first cell is provided with an antisense nucleic acid that is complementary to at least a portion of a proliferation-required operon. Production of a sublethal level of the antisense nucleic acid within the cell causes the cell to be sensitized to the effects of compounds that may have little or no proliferation inhibiting activity against an unsensitized cell. Both the cell that has been sensitized with the antisense nucleic acid and an unsensitized cell, preferably of the same species as the sensitized cells, are then contacted with a compound and the effect of the compound on the proliferation of each cell is measured. A greater reduction in the extent of proliferation of the sensitized after contact with the compound compared to the reduction in the extent of proliferation of the unsensitized cell after contact with the compound indicates that the compound possesses the ability to reduce cellular proliferation. It will be appreciated that the above methods can also be performed by comparing the effect of a compound on the extent of proliferation between a cells that have been sensitized at different levels (see FIGS. 8A and 8B). The level of sensitization of a cell can be controlled by providing more or less of an antisense nucleic acid that is complementary to a proliferation-required operon.

[0551] In some embodiments of the present invention, promoter replacement or regulatory element insertion methods can be used to produce sensitized cells by inhibiting the activity or reducing the amount of one or more proliferation-required genes that are contained within a proliferation-required operon. Such sensitized cells can be used to identify compounds that possess the ability to inhibit cellular proliferation. Promoter replacement and operon insertion methods are described above in connection with methods of identifying proliferation-required genes and methods of inhibiting cellular proliferation.

[0552] It will be appreciated that the methods of identifying compounds which inhibit microbial proliferation as described herein can be performed with any microbe including, but not limited to, the pathogenic microbes selected from the group consisting of Acinetobacter baumannii, Anaplasma marginale, Bacillus anthracis, Bacteroides fragilis, Bordetella pertussis, Borrelia burgdorferi, Brucella abortus, Brucella melitensis, Burkholderia cepacia, Burkholderia fungorum, Burkholderia mallei, Campylobacter jejuni, Chlamydia pneumoniae, Chlamydia trachomatis, Clostridium acetobutylicum, Clostridium botulinum, Clostridium difficile, Clostridium perfringens, Corynebacterium diptheriae, Coxiella burnetii, Enterobacter cloacae, Enterococcus faecalis, Enterococcus faecium, Escherichia coli, Francisella tularensis, Haemophilus influenzae, Helicobacter pylori, Klebsiella pneumoniae, Legionella pneumophila, Listeria monocytogenes, Moraxella catarrhalis, Mycobacterium avium, Mycobacterium bovis, Mycobacterium leprae, Mycobacterium tuberculosis, Mycoplasma genitalium, Mycoplasma pneumoniae, Neisseria gonorrhoeae, Neisseria meningitidis, Nocardia asteroides, Pasteurella haemolytica, Pasteurella multocida, Proteus mirabilis, Proteus vulgaris, Pseudomonas aeruginosa, Pseudomonas putida, Pseudomonas syringae, Rickettsia rickettsii, Rochalimaea quintana, Salmonella bongori, Salmonella cholerasuis, Salmonella enterica, Salmonella paratyphi, Salmonella typhi, Salmonella typhimurium, Shigella boydii, Shigella dysenteriae, Shigella flexneri, Shigella sonnei, Staphylococcus aureus, Staphylococcus epidermidis, Staphylococcus haemolyticus, Streptococcus pneumoniae, Streptococcus mutans, Streptococcus pyogenes, Treponema pallidum, Ureaplasma urealyticum, Vibrio cholerae, Vibrio parahaemolyticus, Vibrio vulnificans, Yersinia enterocolitica, Yersinia pestis and any species falling within the genera of any of the above species.

[0553] Methods of Using Homologous Sequences

[0554] In one embodiment of the present invention, the above-described methods of inhibiting proliferation and methods of identifying compounds that inhibit proliferation can be implemented by providing an antisense nucleic acid that is complementary to at least a portion of an operon which comprises a coding nucleic acid sequence that is homologous to a proliferation-required nucleic acid having a nucleotide sequence selected from the group consisting of SEQ ID NOs: 201-550. Additionally, in another embodiment the antisense nucleic acid is complementary to at least a portion of an operon which comprises a gene that encodes a polypeptide that is homologous to a polypeptide having an amino acid sequence selected from the group consisting of SEQ ID NOs: 551-824. In either of these embodiments, the antisense nucleic acid can be complementary to at least a portion of an operon that is identified by an operon prediction method described herein and which is required for the proliferation of Acinetobacter baumannii, Anaplasma marginale, Bacillus anthracis, Bacteroides fragilis, Bordetella pertussis, Borrelia burgdorferi, Brucella abortus, Brucella melitensis, Burkholderia cepacia, Burkholderia fungorum, Burkholderia mallei, Campylobacter jejuni, Chlamydia pneumoniae, Chlamydia trachomatis, Clostridium acetobutylicum, Clostridium botulinum, Clostridium difficile, Clostridium perfringens, Corynebacterium diptheriae, Coxiella burnetii, Enterobacter cloacae, Enterococcus faecalis, Enterococcus faecium, Escherichia coli, Francisella tularensis, Haemophilus influenzae, Helicobacter pylori, Klebsiella pneumoniae, Legionella pneumophila, Listeria monocytogenes, Moraxella catarrhalis, Mycobacterium avium, Mycobacterium bovis, Mycobacterium leprae, Mycobacterium tuberculosis, Mycoplasma genitalium, Mycoplasma pneumoniae, Neisseria gonorrhoeae, Neisseria meningitidis, Nocardia asteroides, Pasteurella haemolytica, Pasteurella multocida, Proteus mirabilis, Proteus vulgaris, Pseudomonas aeruginosa, Pseudomonas putida, Pseudomonas syringae, Rickettsia rickettsii, Rochalimaea quintana, Salmonella bongori, Salmonella cholerasuis, Salmonella enterica, Salmonella paratyphi, Salmonella typhi, Salmonella typhimurium, Shigella boydii, Shigella dysenteriae, Shigella flexneri, Shigella sonnei, Staphylococcus aureus, Staphylococcus epidermidis, Staphylococcus haemolyticus, Streptococcus pneumoniae, Streptococcus mutans, Streptococcus pyogenes, Treponema pallidum, Ureaplasma urealyticum, Vibrio cholerae, Vibrio parahaemolyticus, Vibrio vulnificans, Yersinia enterocolitica, Yersinia pestis or any species falling within the genera of any of the above species.

[0555] The present invention also contemplates the use of antisense nucleic acids that are complementary to at least a portion of an operon comprising a nucleotide sequence selected from the group consisting of SEQ ID NOs: 1-194, wherein the portion does not include a nucleotide sequence selected from a group consisting of SEQ IN NOs: 201-550 in organisms other than Staphylococcus aureus. For example, one or more of such antisense nucleic acids, can be provided to a pathogenic microbe including, but not limited to, Acinetobacter baumannii, Anaplasma marginale, Bacillus anthracis, Bacteroides fragilis, Bordetella pertussis, Borrelia burgdorferi, Brucella abortus, Brucella melitensis, Burkholderia cepacia, Burkholderia fungorum, Burkholderia mallei, Campylobacter jejuni, Chlamydia pneumoniae, Chlamydia trachomatis, Clostridium acetobutylicum, Clostridium botulinum, Clostridium difficile, Clostridium perfringens, Corynebacterium diptheriae, Coxiella burnetii, Enterobacter cloacae, Enterococcus faecalis, Enterococcus faecium, Escherichia coli, Francisella tularensis, Haemophilus influenzae, Helicobacter pylori, Klebsiella pneumoniae, Legionella pneumophila, Listeria monocytogenes, Moraxella catarrhalis, Mycobacterium avium, Mycobacterium bovis, Mycobacterium leprae, Mycobacterium tuberculosis, Mycoplasma genitalium, Mycoplasma pneumoniae, Neisseria gonorrhoeae, Neisseria meningitidis, Nocardia asteroides, Pasteurella haemolytica, Pasteurella multocida, Proteus mirabilis, Proteus vulgaris, Pseudomonas aeruginosa, Pseudomonas putida, Pseudomonas syringae, Rickettsia rickettsii, Rochalimaea quintana, Salmonella bongori, Salmonella cholerasuis, Salmonella enterica, Salmonella paratyphi, Salmonella typhi, Salmonella typhimurium, Shigella boydii, Shigella dysenteriae, Shigella flexneri, Shigella sonnei, Staphylococcus aureus, Staphylococcus epidermidis, Staphylococcus haemolyticus, Streptococcus pneumoniae, Streptococcus mutans, Streptococcus pyogenes, Treponema pallidum, Ureaplasma urealyticum, Vibrio cholerae, Vibrio parahaemolyticus, Vibrio vulnificans, Yersinia enterocolitica, Yersinia pestis or any species falling within the genera of any of the above species.

[0556] The antisense nucleic acids described above can be provided to the cell using a variety of methods well known in the art. For example, the above-described antisense nucleic acids can be directly provided to the cell using methods such as transformation or electroporation. Alternatively, such antisense nucleic acid may be provided on an expression vector. In one embodiment of the present invention, the antisense nucleic acids are transferred to vectors capable of function within a species other than the species from which the sequences were obtained. For example, the vector may be functional in Acinetobacter baumannii, Anaplasma marginale, Bacillus anthracis, Bacteroides fragilis, Bordetella pertussis, Borrelia burgdorferi, Brucella abortus, Brucella melitensis, Burkholderia cepacia, Burkholderia fungorum, Burkholderia mallei, Campylobacter jejuni, Chlamydia pneumoniae, Chlamydia trachomatis, Clostridium acetobutylicum, Clostridium botulinum, Clostridium difficile, Clostridium perfringens, Corynebacterium diptheriae, Coxiella burnetii, Enterobacter cloacae, Enterococcus faecalis, Enterococcus faecium, Escherichia coli, Francisella tularensis, Haemophilus influenzae, Helicobacter pylori, Klebsiella pneumoniae, Legionella pneumophila, Listeria monocytogenes, Moraxella catarrhalis, Mycobacterium avium, Mycobacterium bovis, Mycobacterium leprae, Mycobacterium tuberculosis, Mycoplasma genitalium, Mycoplasma pneumoniae, Neisseria gonorrhoeae, Neisseria meningitidis, Nocardia asteroides, Pasteurella haemolytica, Pasteurella multocida, Proteus mirabilis, Proteus vulgaris, Pseudomonas aeruginosa, Pseudomonas putida, Pseudomonas syringae, Rickettsia rickettsii, Rochalimaea quintana, Salmonella bongori, Salmonella cholerasuis, Salmonella enterica, Salmonella paratyphi, Salmonella typhi, Salmonella typhimurium, Shigella boydii, Shigella dysenteriae, Shigella flexneri, Shigella sonnei, Staphylococcus aureus, Staphylococcus epidermidis, Staphylococcus haemolyticus, Streptococcus pneumoniae, Streptococcus mutans, Streptococcus pyogenes, Treponema pallidum, Ureaplasma urealyticum, Vibrio cholerae, Vibrio parahaemolyticus, Vibrio vulnificans, Yersinia enterocolitica, Yersinia pestis or any species falling within the genera of any of the above species. In some embodiments of the present invention, the vector may be functional in an organism other than Staphylococcus aureus. Vectors that can be used for the expression of antisense nucleic acids in numerous organisms have been described above in connection with methods for inhibiting cellular proliferation and methods for identifying compounds which possess antimicrobial activity.

[0557] It will be appreciated by one of ordinary skill in the art, vectors may contain certain elements that are species specific. These elements can include promoter sequences, operator sequences, repressor genes, origins of replication, ribosomal binding sequences, termination sequences, and others. To generate a vector for the expression of any antisense nucleic acid which has been described above in any desired bacterial species, one of ordinary skill in the art would know to use standard molecular biology techniques to isolate vectors containing the sequences of interest from cultured bacterial cells, isolate and purify those sequences, and subclone those sequences into a vector adapted for use in the species of bacteria to be screened.

[0558] The antisense nucleic acids which are provided to a cell, either directly or via expression vector, can be used to inhibit cellular proliferation or to produce sensitized cells for use in identifying compounds having antimicrobial activity. Each of these methods have been described in detail above.

[0559] Therapeutics

[0560] In still another embodiment of the present invention, an antisense nucleic acid that is complementary to at least a portion of a proliferation-required operon identified using the operon prediction methods described herein is provided to a cell as an antisense therapeutic. In some embodiments, an antisense nucleic acid that is complementary to at least a portion of an operon comprising a nucleotide sequence selected from the group consisting of SEQ ID NOs: 1-194, wherein the portion does not include a nucleotide sequence selected from the group consisting of SEQ ID NOs: 201-550 is provided to a cell as an antisense therapeutic. Antisense therapeutics can be complementary to operons in which proliferation-required genes are contained or to operons in which the combination of a plurality genes is required for proliferation. Accordingly, the antisense therapeutic can mediate its effect by inhibiting the activity or reducing the amount of one or more gene products contained within the proliferation-required operon. Thus, the antisense therapeutic can be complementary to at least a portion of an operon that corresponds to a gene that is required for proliferation or portion thereof, a 5′ noncoding region or a 3′ noncoding region located upstream or downstream from the actual gene that is required for proliferation or a portion thereof, an intergenic sequence (i.e. a sequence between genes) or a portion thereof, a gene that is not required for proliferation or a portion thereof, or a nucleotide sequence spanning at least a portion of two or more genes.

[0561] It will be appreciated that by performing the methods described herein, antisense therapeutics can be developed against pathogenic microbes which include, but are not limited to, Acinetobacter baumannii, Anaplasma marginale, Bacillus anthracis, Bacteroides fragilis, Bordetella pertussis, Borrelia burgdorferi, Brucella abortus, Brucella melitensis, Burkholderia cepacia, Burkholderia fungorum, Burkholderia mallei, Campylobacter jejuni, Chlamydia pneumoniae, Chlamydia trachomatis, Clostridium acetobutylicum, Clostridium botulinum, Clostridium difficile, Clostridium perfringens, Corynebacterium diptheriae, Coxiella burnetii, Enterobacter cloacae, Enterococcus faecalis, Enterococcus faecium, Escherichia coli, Francisella tularensis, Haemophilus influenzae, Helicobacter pylori, Klebsiella pneumoniae, Legionella pneumophila, Listeria monocytogenes, Moraxella catarrhalis, Mycobacterium avium, Mycobacterium bovis, Mycobacterium leprae, Mycobacterium tuberculosis, Mycoplasma genitalium, Mycoplasma pneumoniae, Neisseria gonorrhoeae, Neisseria meningitidis, Nocardia asteroides, Pasteurella haemolytica, Pasteurella multocida, Proteus mirabilis, Proteus vulgaris, Pseudomonas aeruginosa, Pseudomonas putida, Pseudomonas syringae, Rickettsia rickettsii, Rochalimaea quintana, Salmonella bongori, Salmonella cholerasuis, Salmonella enterica, Salmonella paratyphi, Salmonella typhi, Salmonella typhimurium, Shigella boydii, Shigella dysenteriae, Shigella flexneri, Shigella sonnei, Staphylococcus aureus, Staphylococcus epidermidis, Staphylococcus haemolyticus, Streptococcus pneumoniae, Streptococcus mutans, Streptococcus pyogenes, Treponema pallidum, Ureaplasma urealyticum, Vibrio cholerae, Vibrio parahaemolyticus, Vibrio vulnificans, Yersinia enterocolitica, Yersinia pestis and any species falling within the genera of any of the above species.

[0562] The following examples teach methods of identifying the operons which comprise at least one gene that is required for proliferation as well as the use of antisense nucleic acids complementary to at least a portion of proliferation-required operon to inhibit cellular proliferation and to identify compounds that inhibit cellular proliferation. These examples are illustrative only and are not intended to limit the scope of the present invention.

### EXAMPLES

[0563] The following examples are directed to the identification of genes required for proliferation as well as identification of the proliferation-required operons in which these genes are contained. A variety of methods to utilize the identified proliferation-required operons are also discussed. It will be appreciated that the operons comprising a nucleotide sequence selected from the group consisting of SEQ ID NOs: 1-194 can be used in methods below which utilize proliferation-required operons. Likewise, operons containing one or more genes that are homologous to a proliferation-required gene contained within any of these operons can also be used in the methods below which utilize proliferation-required operons.

[0564] Genes Identified as Required for Proliferation of Escherichia coli, Staphylococcus Aureus, Enterococcus Faecalis, Klebsiella Pneumoniae, Pseudomonas Aeruginosa and Salmonella Typhimurium.

[0565] Genomic fragments were operably linked to an inducible promoter in a vector and assayed for growth inhibition activity. Example 1 describes the examination of a library of genomic fragments cloned into vectors comprising inducible promoters. Upon induction with xylose or IPTG, the vectors produced an RNA molecule corresponding to the subcloned genomic fragments. In those instances where the genomic fragments were in an antisense orientation with respect to the promoter, the transcript produced was complementary to at least a portion of an mRNA (messenger RNA) encoding a Escherichia coli, Staphylococcus aureus, Enterococcus faecalis, Klebsiella pneumoniae, Pseudomonas aeruginosa or Salmonella typhimurium gene product such that they interacted with sense mRNA produced from various Escherichia coli, Staphylococcus aureus, Enterococcus faecalis, Klebsiella pneumoniae, Pseudomonas aeruginosa or Salmonella typhimurium genes and thereby decreased the translation efficiency or the level of the sense messenger RNA thus decreasing production of the protein encoded by these sense mRNA molecules. In cases where the sense mRNA encoded a protein required for proliferation, bacterial cells containing a vector from which transcription from the promoter had been induced failed to grow or grew at a substantially reduced rate. Additionally, in cases where the transcript produced was complementary to at least a portion of a non-translated RNA and where that non-translated RNA was required for proliferation, bacterial cells containing a vector from which transcription from the promoter had been induced also failed to grow or grew at a substantially reduced rate. In contrast, cells grown under non-inducing conditions grow at a normal rate.

[0566] The above method was used to identify genes required for cellular proliferation in Escherichia coli, Staphylococcus aureus, Enterococcus faecalis, Klebsiella pneumoniae, Pseudomonas aeruginosa and Salmonella typhimurium. Additionally, a number of genes required for cellular proliferation in Escherichia coli, Staphylococcus aureus, Enterococcus faecalis, Klebsiella pneumoniae, Pseudomonas aeruginosa and Salmonella typhimurium, which have been described in the following U.S. Patent Applications, the disclosures of which are incorporated herein by reference in their entireties: U.S. patent application Ser. No. 09/492,709, entitled GENES IDENTIFIED AS REQUIRED FOR PROLIFERATION IN ESCHERICHIA COLI, filed Jan. 27, 2000; Ser. No. 09/711,164, entitled GENES ESSENTIAL FOR MICROBIAL PROLIFERATION AND ANTISENSE THERETO, filed Nov. 9, 2000; Ser. No. 09/741,669, entitled GENES IDENTIFIED AS REQUIRED FOR PROLIFERATION OF E. COLI, filed Dec. 19, 2000; Ser. No. 09/815,242, entitled IDENTIFICATION OF ESSENTIAL GENES IN PROKARYOTES, filed Mar. 21, 2001 and Ser. No. 10/282,122, entitled IDENTIFICATION OF ESSENTIAL GENES IN MICROORGANISMS, filed Oct. 25, 2002, have been previously identified using the above method.

### Example 1

### Inhibition of Bacterial Proliferation after Induction of Antisense Expression

[0567] To identify genes required for proliferation of E. coli, random genomic fragments were cloned into the IPTG-inducible expression vector pLEX5BA (Krause et al., J. Mol. Biol. 274: 365 (1997), the disclosure of which is incorporated herein by reference in its entirety) or a modified version of pLEX5BA, pLEX5BA-3′ in which a synthetic linker containing a T7 terminator was ligated between the PstI and HindIII sites of pLEX5BA. In particular, to construct pLEX5BA-3′, the following oligonucleotides were annealed and inserted into the PstI and HindIII sites of pLEX5BA:

| | |
|---|---|
| 5′-GTCTAGCATAACCCCTTGGGGCCTCTAAACG | (SEQ ID NO: 825) |
| GGTCCTTGAGGGGTTTTTTGA-3′ | |
| 5′-AGCTTCAAAAAACCCCTCAAGGACCCGTTTA | (SEQ ID NO: 826) |
| GAGGCCCCAAGGGGTTATGCTAGACTGCA-3′ | |

[0568] Random fragments of E. coli genomic DNA were generated by DNAseI digestion or sonication, filled in with T4 polymerase, and cloned into the SmaI site of pLEX5BA or pLEX5BA-3′. Upon activation or induction, the promoter transcribed the random genomic fragments.

[0569] A number of vectors which allow the production of transcripts which have an extended lifetime in E. coli as well as other Gram negative bacteria can also be utilized in conjunction with these antisense inhibition experiments. Such vectors are described in U.S. patent application Ser. No. 10/327592, entitled STABILIZED NUCLEIC ACIDS IN GENE AND DRUG DISCOVERY AND METHODS OF USE, filed Dec. 20, 2002, the disclosure of which is incorporated herein by reference in its entirety. Briefly, the stabilized antisense RNA may comprise an antisense RNA which was identified as inhibiting proliferation as described above which has been engineered to contain at least one stem loop flanking each end of the antisense nucleic acid. In some embodiments, the at least one stem-loop structure formed at the 5′ end of the stabilized antisense nucleic acid comprises a flush, double stranded 5′ end. In some embodiments, one or more of the stem loops comprises a rho independent terminator. In additional embodiments, the stabilized antisense RNA lacks a ribosome binding site. In further embodiments, the stabilized RNA lacks sites which are cleaved by one or more RNAses, such as RNAse E or RNAse III. In some embodiments, the stabilized antisense RNA may be transcribed in a cell which the activity of at least one enzyme involved in RNA degradation has been reduced. For example, the activity of an enzyme such as RNase E, RNase II, RNase III, polynucleotide phosphorylase, and poly(A) polymerase, RNA helicase, enolase or an enzyme having similar functions may be reduced in the cell.

[0570] To study the effects of transcriptional induction in liquid medium, growth curves were carried out by back diluting cultures 1:200 into fresh media with or without 1 mM IPTG and measuring the OD₄₅₀ every 30 minutes (min). To study the effects of transcriptional induction on solid medium, 10², 10³, 10⁴, 10⁵, 10⁶, 10⁷ and 10⁸ fold dilutions of overnight cultures were prepared. Aliquots of from 0.5 to 3 μl of these dilutions were spotted on selective agar plates with or without 1 mM IPTG. After overnight incubation, the plates were compared to assess the sensitivity of the clones to IPTG.

[0571] Of the numerous clones tested, some clones were identified as containing a sequence that inhibited E. coli growth after IPTG induction. Accordingly, the gene to which the inserted nucleic acid sequence corresponds, or a gene within the operon containing the inserted nucleic acid, is required for proliferation in E. coli.

[0572] Nucleic acids involved in proliferation of Staphylococcus aureus, Enterococcus faecalis, Klebsiella pneumoniae, Pseudomonas aeruginosa and Salmonella typhimurium were identified as follows. Randomly generated fragments of Staphylococcus aureus, Enterococcus faecalis, Klebsiella pneumoniae, Pseudomonas aeruginosa or Salmonella typhimurium genomic DNA were transcribed from inducible promoters.

[0573] In the case of Staphylococcus aureus, a novel inducible promoter system, XylT5, comprising a modified T5 promoter fused to the xylO operator from the xylA promoter of Staphylococcus aureus was used. The promoter is described in U.S. patent application Ser. No. 10/032,393, entitled BACTERIAL PROMOTERS AND METHODS OF USE, filed Dec. 21, 2001, the disclosure of which is incorporated herein by reference in its entirety. Transcription from this hybrid promoter is inducible by xylose.

[0574] Randomly generated fragments of Salmonella typhimurium genomic DNA were transcribed from an IPTG inducible promoter in pLEX5BA (Krause et al., J. Mol. Biol. 274: 365 (1997) or a derivative thereof. Randomly generated fragments of Klebsiella pneumoniae genomic DNA were expressed from an IPTG inducible promoter in pLEX5BA-Kan. To construct pLEX5BA-kan, pLEX5BA was digested to completion with ClaI in order to remove the bla gene. Then the plasmid was treated with a partial NotI digestion and blunted with T4 DNA polymerase. A 3.2 kbp fragment was then gel purified and ligated to a blunted 1.3 kbp kan gene from pKanπ. Kan resistant transformants were selected on Kan plates. Orientation of the kan gene was checked by SmaI digestion. A clone, which had the kan gene in the same orientation as the bla gene, was used to identify genes required for proliferation of Klebsiella pneumoniae.

[0575] Randomly generated fragments of Pseudomonas aeruginosa genomic DNA were transcribed from a two-component inducible promoter system. Integrated on the chromosome was the T7 RNA polymerase gene regulated by lacUV5/lacO (Brunschwig, E. and Darzins, A. 1992. Gene 111:35-41, the disclosure of which is incorporated herein by reference in its entirety). On a separate plasmid, a T7 gene 10 promoter, which is transcribed by T7 RNA polymerase, was fused with a lacO operator followed by a multiple cloning site.

[0576] Should the genomic DNA downstream of the promoter contain, in an antisense orientation, at least a portion of an mRNA or a non-translated RNA encoding a gene product involved in proliferation, then induction of transcription from the promoter will result in detectable inhibition of proliferation.

[0577] In the case of Staphylococcus aureus, a shotgun library of Staphylococcus aureus genomic fragments was cloned into the vector pXyIT5-P15a, which harbors the XylT5 inducible promoter. The vector was linearized at a unique BamHI site immediately downstream of the XyIT5 promoter/operator. The linearized vector was treated with shrimp alkaline phosphatase to prevent reclosure of the linearized ends. Genomic DNA isolated from Staphylococcus aureus strain RN450 was fully digested with the restriction enzyme Sau3A , or , alternatively, partially digested with DNaseI and “blunt-ended” by incubating with T4 DNA polymerase. Random genomic fragments between 200 and 800 base pairs in length were selected by gel purification. The size-selected genomic fragments were added to the linearized and dephosphorylated vector at a molar ratio of 0.1 to 1, and ligated to form a shotgun library.

[0578] The ligated products were transformed into electrocompetent E. coli strain XL1-Blue MRF′ (Stratagene) and plated on LB medium with supplemented with carbenicillin at 100 μg/ml. Resulting colonies numbering 5×10⁵ or greater were scraped and combined, and were then subjected to plasmid purification.

[0579] The purified library was then transformed into electrocompetent Staphylococcus aureus RN4220. Resulting transformants were plated on agar containing LB+0.2% glucose (LBG medium)+chloramphenicol at 15 μg/ml (LBG+CM15 medium) in order to generate 100 to 150 platings at 500 colonies per plating. The colonies were subjected to robotic picking and arrayed into wells of 384 well culture dishes. Each well contained 100 μl of LBG+CM15 liquid medium. Inoculated 384 well dishes were incubated 16 hours at 37° C., and each well was robotically gridded onto solid LBG+CM15 medium with or without 2% xylose. Gridded plates were incubated 16 hours at 37° C., and then manually scored for arrayed colonies that were growth-compromised in the presence of xylose.

[0580] Arrayed colonies that were growth-sensitive on medium containing 2% xylose, yet were able to grow on similar medium lacking xylose, were subjected to further growth sensitivity analysis as follows: Colonies from the plate lacking xylose were manually picked and inoculated into individual wells of a 96 well culture dish containing LBG+CM15, and were incubated for 16 hours at 37° C. These cultures were robotically diluted 1/100 into fresh medium and allowed to incubate for 4 hours at 37° C., after which they were subjected to serial dilutions in a 384 well array and then gridded onto media containing 2% xylose or media lacking xylose. After growth for 16 hours at 37° C., the arrays that resulted on the two media were compared to each other. Clones that grew similarly at all dilutions on both media were scored as a negative and were no longer considered. Clones that grew on xylose medium but failed to grow at the same serial dilution on the non-xylose plate were given a score based on the differential, i.e. should the clone grow at a serial dilution of 10⁴ or less on the xylose plate and grow at a serial dilution of 10⁸ or less on the non-xylose plate, then the corresponding clone received a score of “4” representing the log difference in growth observed.

[0581] For Salmonella typhimurium and Klebsiella pneumoniae growth curves were carried out by back diluting cultures 1:200 into fresh media containing 1 mM IPTG or media lacking IPTG and measuring the OD₄₅₀ every 30 minutes (min). To study the effects of transcriptional induction on solid medium, 10², 10³, 10⁴, 10⁵, 10⁶, 10⁷ and 10⁸ fold dilutions of overnight cultures were prepared. Aliquots of from 0.5 to 3 μl of these dilutions were spotted on selective agar plates with or without 1 mM IPTG. After overnight incubation, the plates were compared to assess the sensitivity of the clones to IPTG.

[0582] Nucleic acids involved in proliferation of Pseudomonas aeruginosa were identified as follows. Randomly generated fragments of Pseudomonas aeruginosa genomic DNA were transcribed from a two-component inducible promoter system. Integrated on the chromosome was the T7 RNA polymerase gene regulated by lacUV5/lacO (Brunschwig, E. and Darzins, A. 1992. Gene 111:35-41). On an expression plasmid there was a T7 gene 10 promoter, which is transcribed by T7 RNA polymerase, fused with a lacO operator followed by a multiple cloning site. Transcription from this hybrid promoter is inducible by IPTG. Should the genomic DNA downstream of the promoter contain, in an antisense orientation, at least a portion of an mRNA encoding a gene product involved in proliferation, then induction of expression from the promoter will result in detectable inhibition of proliferation.

[0583] A shotgun library of Pseudomonas aeruginosa genomic fragments was cloned into the vectors pEP5, pEP5S, or other similarly constructed vectors which harbor the T7lacO inducible promoter. The vector was linearized at a unique SmaI site immediately downstream of the T7lacO promoter/operator. The linearized vector was treated with shrimp alkaline phosphatase to prevent reclosure of the linearized ends. Genomic DNA isolated from Pseudomonas aeruginosa strain PAO1 was partially digested with DNaseI and “blunt-ended” by incubating with T4 DNA polymerase. Random genomic fragments between 200 and 800 base pairs in length were selected by gel purification. The size-selected genomic fragments were added to the linearized and dephosphorylated vector at a molar ratio of 2 to 1, and ligated to form a shotgun library.

[0584] The ligated products were transformed into electrocompetent E. coli strain XL1-Blue MRF′ (Stratagene) and plated on LB medium with carbenicillin at 100 μg/ml or Streptomycin 100 μg/ml. Resulting colonies numbering 5×10⁵ or greater were scraped and combined, and were then subjected to plasmid purification.

[0585] The purified library was then transformed into electrocompetent Pseudomonas aeruginosa strain PAO1. Resulting transformants were plated on LB agar with carbenicillin at 100 μg/ml or Streptomycin 40 μg/ml in order to generate 100 to 150 platings at 500 colonies per plating. The colonies were subjected to robotic picking and arrayed into wells of 384 well culture dishes. Each well contained 100 μl of LB+CB100 or Streptomycin 40 liquid medium. Inoculated 384 well dishes were incubated 16 hours at room temperature, and each well was robotically gridded onto solid LB+CB100 or Streptomycin 40 medium with or without 1 mM IPTG. Gridded plates were incubated 16 hours at 37° C., and then manually scored for arrayed colonies that were growth-compromised in the presence of IPTG.

[0586] Arrayed colonies that were growth-sensitive on medium containing 1 mM IPTG, yet were able to grow on similar medium lacking IPTG, were subjected to further growth sensitivity analysis as follows: Colonies from the plate lacking IPTG were manually picked and inoculated into individual wells of a 96 well culture dish containing LB+CB100 or Streptomycin 40, and were incubated for 16 hours at 30° C. These cultures were robotically diluted 1/100 into fresh medium and allowed to incubate for 4 hours at 37° C., after which they were subjected to serial dilutions in a 384 well array and then gridded onto media with and without 1 mM IPTG. After growth for 16 hours at 37° C., the arrays of serially diluted spots that resulted were compared between the two media. Clones that grew similarly at all dilutions on both media were scored as a negative and were no longer considered. Clones that grew on IPTG medium but failed to grow at the same serial dilution on the non-IPTG plate were given a score based on the differential, i.e. should the clone grow at a serial dilution of 10⁴ or less on the IPTG plate and grow at a serial dilution of 10⁸ or less on the IPTG plate, then the corresponding clone received a score of “4” representing the log difference in growth observed.

[0587] Following the identification of those vectors that, upon induction, negatively impacted Pseudomonas aeruginosa growth or proliferation, the inserts or nucleic acid fragments contained in those vectors were isolated for subsequent characterization. Vectors of interest were subjected to nucleic acid sequence determination.

[0588] Nucleic acids involved in proliferation of E. faecalis were identified as follows. Randomly generated fragments of genomic DNA were expressed from the vectors pEPEF3 or pEPEF14, which contain the CP25 or P59 promoter, respectively, regulated by the xyl operator/repressor. These plasmids as well as other vectors useful for the expression of nucleic acids in Enterococcus faecalis and other Gram positive organisms are described in U.S. patent application Ser. No. 10/032,393, entitled BACTERIAL PROMOTERS AND METHODS OF USE, filed Dec. 21, 2001, the disclosure of which is incorporated herein by reference in its entirety. Should the genomic DNA downstream of the promoter contain, in an antisense orientation, at least a portion of a mRNA encoding a gene product involved in proliferation, then induction of expression from the promoter will result in detectable inhibition of proliferation.

[0589] A shotgun library of E. faecalis genomic fragments was cloned into the vector pEPEF3 or pEPEF14, which harbor xylose inducible promoters. The vector was linearized at a unique SmaI site immediately downstream of the promoter/operator. The linearized vector was treated with alkaline phosphatase to prevent reclosure of the linearized ends. Genomic DNA isolated from E. faecalis strain OG1RF was partially digested with DNaseI and “blunt-ended” by incubating with T4 DNA polymerase. Random genomic fragments between 200 and 800 base pairs in length were selected by gel purification. The size-selected genomic fragments were added to the linearized and dephosphorylated vector at a molar ratio of 2 to 1, and ligated to form a shotgun library.

[0590] The ligated products were transformed into electrocompetent E. coli strain TOP10 cells (Invitrogen) and plated on LB medium with erythromycin (Erm) at 150 μg/ml. Resulting colonies numbering 5×10⁵ or greater were scraped and combined, and were then subjected to plasmid purification.

[0591] The purified library was then transformed into electrocompetent E. faecalis strain OG1RF. Resulting transformants were plated on Todd-Hewitt (TH) agar with erythromycin at 10 μg/ml in order to generate 100 to 150 platings at 500 colonies per plating. The colonies were subjected to robotic picking and arrayed into wells of 384 well culture dishes. Each well contained 100 μl of THB+Erm 10 μg/ml. Inoculated 384 well dishes were incubated 16 hours at room temperature, and each well was robotically gridded onto solid TH agar+Erm with or without 5% xylose. Gridded plates were incubated 16 hours at 37° C., and then manually scored for arrayed colonies that were growth-compromised in the presence of xylose.

[0592] Arrayed colonies that were growth-sensitive on medium containing 5% xylose, yet were able to grow on similar medium lacking xylose, were subjected to further growth sensitivity analysis. Colonies from the plate lacking xylose were manually picked and inoculated into individual wells of a 96 well culture dish containing THB+Erm 10, and were incubated for 16 hours at 30° C. These cultures were robotically diluted 1/100 into fresh medium and allowed to incubate for 4 hours at 37° C., after which they were subjected to serial dilution on plates containing 5% xylose or plates lacking xylose. After growth for 16 hours at 37° C., the arrays of serially diluted spots that resulted were compared between the two media. Colonies that grew similarly on both media were scored as a negative and corresponding colonies were no longer considered. Colonies on xylose medium that failed to grow to the same serial dilution compared to those on the non-xylose plate were given a score based on the differential. For example, colonies on xylose medium that only grow to a serial dilution of −4 while they were able to grow to −8 on the non-xylose plate, then the corresponding transformant colony received a score of “4” representing the log difference in growth observed.

[0593] Following the identification of those vectors that, upon induction, negatively impacted E. faecalis growth or proliferation, the inserts or nucleic acid fragments contained in those expression vectors were isolated for subsequent characterization. The inserts in the vectors of interest were subjected to nucleotide sequence determination.

[0594] It will be appreciated that other restriction enzymes and other endonucleases or methodologies may be used to generate random genomic fragments. In addition, random genomic fragments may be generated by mechanical shearing. Sonication and nebulization are two such techniques commonly used for mechanical shearing of DNA.

### Example 2

### Nucleotide Sequence Determination of Identified Clones Transcribing Nucleic Acid Fragments with Detrimental Effects on Escherichia coli, Staphylococcus aureus, Enterococcus faecalis, Klebsiella pneumoniae, Pseudomonas aeruginosa or Salmonella typhimurium Proliferation

[0595] Plasmids from clones that received a dilution plating score of “2” or greater were isolated to obtain the genomic DNA insert responsible for growth inhibition as follows.

[0596] The nucleotide sequences of the nucleic acid sequences which inhibited the growth of Escherichia coli were determined using plasmid DNA isolated using QIAPREP (Qiagen, Valencia, Calif.) and methods supplied by the manufacturer. The primers used for sequencing the inserts were 5′-TGTTTATCAGACCGCTT-3′ (SEQ ID NO: 827) and 5′-ACAATTTCACACAGCCTC-3′ (SEQ ID NO: 828). These sequences flank the polylinker in pLEX5BA.

[0597] The nucleotide sequences of the nucleic acid sequences which inhibited the growth of Staphylococcus aureus were determined as follows. Staphylococcus aureus were grown in standard laboratory media (LB or TB with 15 μg/ml Chloramphenicol to select for the plasmid). Growth was carried out at 37° C. overnight in culture tubes or 2 ml deep well microtiter plates.

[0598] Lysis of Staphylococcus aureus was performed as follows. Cultures (2-5 ml) were centrifuged and the cell pellets resuspended in 1.5 mg/ml solution of lysostaphin (20 μl/ml of original culture) followed by addition of 250 μl of resuspension buffer (Qiagen). Alternatively, cell pellets were resuspended directly in 250 μl of resuspension buffer (Qiagen) to which 5-20 μl of a 1 mg/ml lysostaphin solution were added.

[0599] DNA was isolated using Qiagen miniprep kits or Wizard (Qiagen) miniprep kits according to the instructions provided by the manufacturer.

[0600] The genomic DNA inserts were amplified from the purified plasmids by PCR as follows.

[0601] 1 μl of Qiagen purified plasmid was put into a total reaction volume of 25 μl Qiagen Hot Start PCR mix. For Staphylococcus aureus, the following primers were used in the PCR reaction:

| | | |
|---|---|---|
| pXylT5F: | CAGCAGTCTGAGTTATAAAATAG | (SEQ ID NO: 829) |
| LexL | TGTTTTATCAGACCGCTT | (SEQ ID NO: 830) |

[0602] Similar methods were conducted for Salmonella typhimurium and Klebsiella pneumoniae. For Salmonella typhimurium and Klebsiella pneumoniae the following primers were used:

| | |
|---|---|
| 5′-TGTTTTATCAGACCGCTT-3′ | (SEQ ID NO: 830) |
| and | |
| 5′-ACAATTTCACACAGCCTC-3′ | (SEQ ID NO: 828) |

PCR was carried out in a PE GenAmp with the following cycle times:
[0604] Step 1. 95° C. 15 min
[0605] Step 2. 94° C. 45 sec
[0606] Step 3. 54° C. 45 sec
[0607] Step 4. 72° C. 1 minute
[0608] Step 5. Return to step 2, 29 times
[0609] Step 6. 72° C. 10 minutes
[0610] Step 7. 4° C. hold
   The PCR products were cleaned using Qiagen Qiaquick PCR plates according to the manufacturer's instructions.

[0612] For Pseudomonas aeruginosa, plasmids from transformant colonies that received a dilution plating score of “2” or greater were isolated to obtain the genomic DNA insert responsible for growth inhibition as follows. Pseudomonas aeruginosa were grown in standard laboratory media (LB with carbenicillin at 100 μg/ml or Streptomycin 40 μg/ml to select for the plasmid). Growth was carried out at 30° C. overnight in 100 μl culture wells in microtiter plates. To amplify insert DNA 2 μl of culture were placed into 25 μl Qiagen Hot Start PCR mix. PCR reactions were in 96 well microtiter plates. For plasmid pEP5S the following primers were used in the PCR reaction:

| | | |
|---|---|---|
| T7L1+: | GTCGGCGATATAGGCGCCAGCAACCG | (SEQ ID NO: 831) |
| pStrA3: | ATAATCGAGCATGAGTATCATACG | (SEQ ID NO: 832) |

PCR was carried out in a PE GenAmp with the following cycle times:
[0614] Step 1. 95° C. 15 min
[0615] Step 2. 94° C. 45 sec
[0616] Step 3. 54° C. 45 sec
[0617] Step 4. 72° C. 1 minute
[0618] Step 5. Return to step 2, 29 times
[0619] Step 6. 72° C. 10 minutes
[0620] Step 7. 4° C. hold
   The PCR products were cleaned using Qiagen Qiaquick PCR plates according to the manufacturer's instructions.

[0622] The purified PCR products were then directly cycle sequenced with Qiagen Hot Start PCR mix. The following primers were used in the sequencing reaction:

| | | |
|---|---|---|
| T7/L2: | ATGCGTCCGGCGTAGAGGAT | (SEQ ID NO: 833) |

PCR was carried out in a PE GenAmp with the following cycle times:
[0624] Step 1. 94° C. 15 min
[0625] Step 2. 96° C. 10 sec
[0626] Step 3. 50° C. 5 sec
[0627] Step 4. 60° C. 4 min
[0628] Step 5. Return to step 2, 24 times
[0629] Step 6. 40° C. hold
   The PCR products were cleaned using Qiagen Qiaquick PCR plates according to the manufacturer's instructions.

[0631] For E. faecalis, plasmids from transformant colonies that received a dilution plating score of “2” or greater were isolated to obtain the genomic DNA insert responsible for growth inhibition as follows. E. faecalis were grown in THB 10 μg/ml Erm at 30° C. overnight in 100 μl culture wells in microtiter plates. To amplify insert DNA 2 μl of culture were placed into 25 μl Qiagen Hot Start PCR mix. PCR reactions were in 96 well microtiter plates. The following primers were used in the PCR reaction:
[0632] pXylT5: CAGCAGTCTGAGTTATAAAATAG (SEQ ID NO: 829) and the pEP/pAK1 primer.
   PCR was carried out in a PE GenAmp with the following cycle times:
[0634] Step 1. 95° C. 15 min
[0635] Step 2. 94° C. 45 sec
[0636] Step 3. 54° C. 45 sec
[0637] Step 4. 72° C. 1 minute
[0638] Step 5. Return to step 2, 29 times
[0639] Step 6. 72° C. 10 minutes
[0640] Step 7. 4° C. hold
   The PCR products were cleaned using Qiagen Qiaquick PCR plates according to the manufacturer's instructions.

[0642] The purified PCR products were then directly cycle sequenced with Qiagen Hot Start PCR mix. The following primers were used in the PCR reaction:

| | | |
|---|---|---|
| pXylT5: | CAGCAGTCTGAGTTATAAAATAG | (SEQ ID NO: 829) |

PCR was carried out in a PE GenAmp with the following cycle times:
[0644] Step 1. 94° C. 15 min
[0645] Step 2. 96° C. 10 sec
[0646] Step 3. 50° C. 5 sec
[0647] Step 4. 60° C. 4 min
[0648] Step 5. Return to step 2, 24 times
[0649] Step 6. 4° C. hold

[0650] The PCR products were cleaned using Qiagen Qiaquick PCR plates according to the manufacturer's instructions. The amplified genomic DNA inserts from each of the above procedures were subjected to automated sequencing.

### Example 3

### Comparison Of Isolated Nucleic Acids to Known Sequences

[0651] The nucleotide sequences of the subcloned fragments from Escherichia coli, Staphylococcus aureus, Enterococcus faecalis, Klebsiella pneumoniae, Pseudomonas aeruginosa and Salmonella typhimurium obtained from the expression vectors discussed above were compared to known sequences from Escherichia coli, Staphylococcus aureus, Enterococcus faecalis, Klebsiella pneumoniae, Pseudomonas aeruginosa, Salmonella typhimurium and other microorganisms as follows. First, to confirm that each clone originated from one location on the chromosome and was not chimeric, the nucleotide sequences of the selected clones were compared against the Escherichia coli, Staphylococcus aureus, Enterococcus faecalis, Klebsiella pneumoniae, Pseudomonas aeruginosa or Salmonella typhimurium genomic sequences to align the clone to the correct position on the chromosome. The NCBI BLASTN v 2.0.9 program was used for this comparison, and the incomplete Staphylococcus aureus genomic sequences licensed from TIGR, as well as the NCBI nonredundant GenBank database were used as the source of genomic data. Salmonella typhimurium sequences were compared to sequences available from the Genome Sequencing Center, and the Sanger Centre. Pseudomonas aeruginosa sequences were compared to a proprietary database and the NCBI GenBank database. The E. faecalis sequences were compared to a proprietary database.

[0652] The BLASTN analysis was performed using the default parameters except that the filtering was turned off. No further analysis was performed on inserts which resulted from the ligation of multiple fragments.

[0653] In general, antisense molecules and their complementary genes are identified as follows. First, all possible full length open reading frames (ORFs) are extracted from available genomic databases. Such databases include the GenBank nonredundant (nr) database, the unfinished genome database available from TIGR and the PathoSeq database developed by Incyte Genomics. The latter database comprises over 40 annotated bacterial genomes including complete ORF analysis. If databases are incomplete with regard to the bacterial genome of interest, it is not necessary to extract all ORFs in the genome but only to extract the ORFs within the portions of the available genomic sequences which are complementary to the clones of interest. Computer algorithms for identifying ORFs, such as GeneMark, are available and well known to those in the art. Comparison of the clone DNA to the complementary ORF(s) allows determination of whether the clone is a sense or antisense clone. Furthermore, each ORF extracted from the database can be compared to sequences in well annotated databases including the GenBank (nr) protein database, SWISSPROT and the like. A description of the gene or of a closely related gene in a closely related microorganism is often available in these databases. Similar methods are used to identify antisense clones corresponding to genes encoding non-translated RNAs.

[0654] Each of the cloned nucleic acid sequences discussed above was used to identify the corresponding Escherichia coli, Staphylococcus aureus, Enterococcus faecalis, Klebsiella pneumoniae, Pseudomonas aeruginosa or Salmonella typhimurium ORFs in the PathoSeq v.4.1 (March 2000 release) database of microbial genomic sequences. For this purpose, the NCBI BLASTN 2.0.9 computer algorithm was used. The default parameters were used except that filtering was turned off. The default parameters for the BLASTN and BLASTX analyses were:
[0655] Expectation value (e)=10
[0656] Alignment view options: pairwise
[0657] Filter query sequence (DUST with BLASTN, SEG with others)=T
[0658] Cost to open a gap (zero invokes behavior)=0
[0659] Cost to extend a gap (zero invokes behavior)=0
[0660] X dropoff value for gapped alignment (in bits) (zero invokes behavior)=0
[0661] Show GI's in deflines=F
[0662] Penalty for a nucleotide mismatch (BLASTN only)=!3
[0663] Reward for a nucleotide match (BLASTN only)=1
[0664] Number of one-line descriptions (V)=500
[0665] Number of alignments to show (B)=250
[0666] Threshold for extending hits=default
[0667] Perform gapped alignment (not available with BLASTX)=T
[0668] Query Genetic code to use=1
[0669] DB Genetic code (for TBLAST[nx]only=1
[0670] Number of processors to use=1
[0671] SeqAlign file
[0672] Believe the query defline=F
[0673] Matrix=BLOSUM62
[0674] Word Size=default
[0675] Effective length of the database (use zero for the real size)=0
[0676] Number of best hits from a region to keep=100
[0677] Length of region used to judge hits=20
[0678] Effective length of the search space (use zero for the real size)=0
[0679] Query strands to search against database (for BLAST[nx] and TBLASTX), 3 is both, 1 is top, 2 is bottom=3
[0680] Produce HTML output=F

[0681] Alternatively, ORFs were identified and refined by conducting a survey of the public and private data sources. Full-length gene protein and nucleotide sequences for these organisms were assembled from various sources. For Pseudomonas aeruginosa, gene sequences were adopted from the Pseudomonas genome sequencing project. The Pseudomonas genome sequencing project can be accessed on the internet by entering the following quoted text, “www.pseudomonas”, in the address bar of a web browser, such as Internet Explorer or Netscape, followed immediately by “.com”. For Klebsiella pneumoniae, Staphylococcus aureus, Streptococcus pneumoniae and Salmonella typhi, genomic sequences from PathoSeq v 4.1 (March 2000 release) was reanalyzed for ORFs using the gene finding software GeneMark v 2.4a, which was purchased from GenePro Inc. 451 Bishop St., N.W., Suite B, Atlanta, Ga., 30318, USA. It will be appreciated that ORFs may also be identified using databases other than PathoSeq. For example, the ORFs may be identified using the methods described in U.S. Provisional Patent Application Ser. No. 60/191,078, filed Mar. 21, 2000, the disclosure of which is incorporated herein by reference in its entirety.

[0682] Antisense clones were identified as those clones for which transcription from the inducible promoter would result in the expression of an RNA antisense to a complementary ORF, intergenic or intragenic sequence. Using the above methods, antisense numerous genes required for cellular proliferation were identified. Genes that were identified as required for proliferation in Staphylococcus aureus are provided herein as SEQ ID NOs: 201-550 (see also Table VI).

[0683] The next Example shows that once a proliferation-required gene has been identified using the above methods, homologous proliferation-required genes can be identified from heterologous organisms.

### Example 4

### Identification of Nucleic Acids Homologous to Nucleic Acids Required for the Proliferation of Staphylococcus aureus in other Bacterial Species

[0684] Nucleic acids homologous to proliferation-required nucleic acids from Staphylococcus aureus were identified as follows. For example, thirty-nine antisense nucleic acids which inhibited the growth of Staphylococcus aureus were identified using methods such as those described herein and were inserted into an expression vector such that their expression was under the control of a xylose-inducible Xyl-T5 promoter. A vector with a reporter gene under control of the Xyl-T5 promoter was used to show that expression from the Xyl-T5 promoter in Staphylococcus epidermidis was comparable to that in Staphylococcus aureus.

[0685] The vectors were introduced into Staphylococcus epidermidis by electroporation as follows: Staphylococcus epidermidis was grown in liquid culture to mid-log phase and then harvested by centrifugation. The cell pellet was resuspended in ⅓ culture volume of ice-cold EP buffer (0.625 M sucrose, 1 mM MgCl₂, pH=4.0), and then harvested again by centrifugation. The cell pellet was then resuspended with 1/40 volume EP buffer and allowed to incubate on ice for 1 hour. The cells were then frozen for storage at −80° C. For electroporation, 50 μl of thawed electrocompetent cells were combined with 0.5 μg plasmid DNA and then subjected to an electrical pulse of 10 kV/cm, 25 uFarads, 200 ohm using a Biorad gene pulser electroporation device. The cells were immediately resuspended with 200 μl outgrowth medium and incubated for 2 hours prior to plating on solid growth medium with drug selection to maintain the plasmid vector. Colonies resulting from overnight growth of these platings were selected, cultured in liquid medium with drug selection, and then subjected to dilution plating analysis as described for Staphylococcus aureus in Example 1 above to test growth sensitivity in the presence of the inducer xylose.

[0686] The results are shown in Table IV below. The first column indicates the Molecule Number of the Staphylococcus aureus antisense nucleic acid which was introduced into Staphylococcus epidermidis. The second column indicates whether the antisense nucleic acid inhibited the growth of Staphylococcus epidermidis, with a indicating that growth was inhibited. Of the 39 Staphylococcus aureus antisense nucleic acids evaluated, 20 inhibited the growth of Staphylococcus epidermidis.

TABLE IV
Sensitivity of Other Microorganisms to Antisense Nucleic
Acids That Inhibit Proliferation of Staphylococcus aureus

| Mol. No. | S. epidermidis |
|---|---|
| SaXA005 | + |
| SaXA007 | + |
| SaXA008 | + |
| SaXA009 | + |
| SaXA010 | + |
| SaXA011 | − |
| SaXA012 | − |
| SaXA013 | − |
| SaXA015 | + |
| SaXA017 | − |
| SaXA022 | + |
| SaXA023 | − |
| SaXA024 | − |
| SaXA025 | + |
| SaXA026 | + |
| SaXA027 | − |
| SaXA027b | − |
| SaXA02c | − |
| SaXA028 | − |
| SaXA029 | + |
| SaXA030 | + |
| SaXA032 | + |
| SaXA033 | + |
| SaXA034 | − |
| SaXA035 | + |
| SaXA037 | + |
| SaXA039 | − |
| SaXA042 | − |
| SaXA043 | − |
| SaXA044 | − |
| SaXA045 | + |
| SaXA051 | + |
| SaXA053 | − |
| SaXA056b | − |
| SaXA059a | + |
| SaXA060 | − |
| SaXA061 | + |
| SaXA062 | + |
| SaXA063 | − |
| SaXA065 | − |

[0687] Although the results shown above were obtained using a subset of proliferation-required nucleic acids from Staphylococcus aureus, it will be appreciated that similar analyses may be performed using other antisense nucleic acids obtained using the methods described herein to determine whether they inhibit the proliferation of cells or microorganisms including Acinetobacter baumannii, Anaplasma marginale, Bacillus anthracis, Bacteroides fragilis, Bordetella pertussis, Borrelia burgdorferi, Brucella abortus, Brucella melitensis, Burkholderia cepacia, Burkholderia fungorum, Burkholderia mallei, Campylobacter jejuni, Chlamydia pneumoniae, Chlamydia trachomatis, Clostridium acetobutylicum, Clostridium botulinum, Clostridium difficile, Clostridium perfringens, Corynebacterium diptheriae, Coxiella burnetii, Enterobacter cloacae, Enterococcus faecalis, Enterococcus faecium, Escherichia coli, Francisella tularensis, Haemophilus influenzae, Helicobacter pylori, Klebsiella pneumoniae, Legionella pneumophila, Listeria monocytogenes, Moraxella catarrhalis, Mycobacterium avium, Mycobacterium bovis, Mycobacterium leprae, Mycobacterium tuberculosis, Mycoplasma genitalium, Mycoplasma pneumoniae, Neisseria gonorrhoeae, Neisseria meningitidis, Nocardia asteroides, Pasteurella haemolytica, Pasteurella multocida, Proteus mirabilis, Proteus vulgaris, Pseudomonas aeruginosa, Pseudomonas putida, Pseudomonas syringae, Rickettsia rickettsii, Rochalimaea quintana, Salmonella bongori, Salmonella cholerasuis, Salmonella enterica, Salmonella paratyphi, Salmonella typhi, Salmonella typhimurium, Shigella boydii, Shigella dysenteriae, Shigella flexneri, Shigella sonnei, Staphylococcus aureus, Staphylococcus epidermidis, Staphylococcus haemolyticus, Streptococcus pneumoniae, Streptococcus mutans, Streptococcus pyogenes, Treponema pallidum, Ureaplasma urealyticum, Vibrio cholerae, Vibrio parahaemolyticus, Vibrio vulnificans, Yersinia enterocolitica, Yersinia pestis and any species falling within the genera of any of the above species.

[0688] The next Example demonstrates methods for identifying homologs to proliferation-required genes by functional complementation.

### Example 5

### Identification of Homologous Nucleic Acids by Functional Complementation

[0689] Homologous coding nucleic acids, homologous antisense nucleic acids or nucleic acids encoding homologous polypeptides can be identified as follows. Gene products whose activities can be complemented by a proliferation-required gene product from Acinetobacter baumannii, Anaplasma marginale, Bacillus anthracis, Bacteroides fragilis, Bordetella pertussis, Borrelia burgdorferi, Brucella abortus, Brucella melitensis, Burkholderia cepacia, Burkholderia fungorum, Burkholderia mallei, Campylobacter jejuni, Chlamydia pneumoniae, Chlamydia trachomatis, Clostridium acetobutylicum, Clostridium botulinum, Clostridium difficile, Clostridium perfringens, Corynebacterium diptheriae, Coxiella burnetii, Enterobacter cloacae, Enterococcus faecalis, Enterococcus faecium, Escherichia coli, Francisella tularensis, Haemophilus influenzae, Helicobacter pylori, Klebsiella pneumoniae, Legionella pneumophila, Listeria monocytogenes, Moraxella catarrhalis, Mycobacterium avium, Mycobacterium bovis, Mycobacterium leprae, Mycobacterium tuberculosis, Mycoplasma genitalium, Mycoplasma pneumoniae, Neisseria gonorrhoeae, Neisseria meningitidis, Nocardia asteroides, Pasteurella haemolytica, Pasteurella multocida, Proteus mirabilis, Proteus vulgaris, Pseudomonas aeruginosa, Pseudomonas putida, Pseudomonas syringae, Rickettsia rickettsii, Rochalimaea quintana, Salmonella bongori, Salmonella cholerasuis, Salmonella enterica, Salmonella paratyphi, Salmonella typhi, Salmonella typhimurium, Shigella boydii, Shigella dysenteriae, Shigella flexneri, Shigella sonnei, Staphylococcus aureus, Staphylococcus epidermidis, Staphylococcus haemolyticus, Streptococcus pneumoniae, Streptococcus mutans, Streptococcus pyogenes, Treponema pallidum, Ureaplasma urealyticum, Vibrio cholerae, Vibrio parahaemolyticus, Vibrio vulnificans, Yersinia enterocolitica, Yersinia pestis or any species falling within the genera of any of the above species are identified using merodiploids, created by introducing a plasmid or Bacterial Artificial Chromosome into an organism having a mutation in the essential gene which reduces or eliminates the activity of the gene product. In some embodiments, the mutation may be a conditional mutation, such as a temperature sensitive mutation, such that the organism proliferates under permissive conditions but is unable to proliferate under non-permissive conditions in the absence of complementation by the gene on the plasmid or Bacterial Artificial Chromosome. Alternatively, duplications may be constructed as described in Roth et al. (1987) Biosynthesis of Aromatic Amino Acids in Escherichia coli and Salmonella typhimurium, F. C. Neidhardt, ed., American Society for Microbiology, publisher, pp. 2269-2270, the disclosure of which is incorporated herein by reference in its entirety. Such methods are familiar to those skilled in the art. Alternatively, homologous coding nucleic acids, homologous antisense nucleic acids or nucleic acids encoding homologous polypeptides may be identified by placing a gene required for proliferation or a nucleic acid complementary to at least a portion of a gene required for proliferation under the control of a regulatable promoter as described above, introducing a plasmid or Bacterial Artificial Chromosome into the cell, and identifying cells which are able to proliferate under conditions which would prevent or reduce proliferation in the absence of the plasmid or Bacterial Artificial Chromosome.

[0690] Homologous coding nucleic acids, homologous antisense nucleic acids or nucleic acids encoding homologous polypeptides can also be identified using databases as described in the next Example.

### Example 6

### Identification of Homologous Nucleic Acids by Database Analysis

[0691] As a demonstration of the methodology required to find homologues to an essential gene, fifty-one prokaryotic organisms were analyzed and compared in detail. First, the most reliable source of gene sequences for each organism was assessed by conducting a survey of the public and private data sources. The fifty-one organisms studied were Escherichia coli, Staphylococcus aureus, Enterococcus faecalis, Klebsiella pneumoniae, Pseudomonas aeruginosa, Salmonella typhimurium, Acinetobacter baumannii, Bacillus anthracis, Bacteroides fragilis, Bordetella pertussis, Borrelia burgdorferi, Burkholderia cepacia, Burkholderia fungorum, Burkholderia mallei, Campylobacter jejuni, Chlamydia pneumoniae, Chlamydia trachomatis, Clostridium acetobutylicum, Clostridium botulinum, Clostridium difficile, Corynebacterium diptheriae, Enterobacter cloacae, Enterococcus faecium, Haemophilus influenzae, Helicobacter pylori, Legionella pneumophila, Listeria monocytogenes, Moraxella catarrhalis, Mycobacterium avium, Mycobacterium bovis, Mycobacterium leprae, Mycobacterium tuberculosis, Mycoplasma genitalium, Mycoplasma pneumoniae, Neisseria gonorrhoeae, Neisseria meningitidis, Pasteurella multocida, Proteus mirabilis, Pseudomonas putida, Pseudomonas syringae, Salmonella paratyphi, Salmonella typhi, Staphylococcus epidermidis, Staphylococcus haemolyticus, Streptococcus mutans, Streptococcus pneumoniae, Streptococcus pyogenes, Treponema pallidum, Ureaplasma urealyticum, Vibrio cholerae and Yersinia pestis. Full-length gene, protein and nucleotide sequences for these organisms were assembled from various sources. For Escherichia coli, Haemophilus influenzae and Helicobacter pylori, gene sequences were adopted from the public sequencing projects, and derived from the GenPept 115 database (available from NCBI). For Pseudomonas aeruginosa, gene sequences were adopted from the Pseudomonas genome sequencing project. For Klebsiella pneumoniae, Staphylococcus aureus, Streptococcus pneumoniae and Salmonella typhi, genomic sequences from PathoSeq v 4.1 (March 2000 release) were reanalyzed for ORFs using the gene finding software GeneMark v 2.4a, which was purchased from GenePro Inc. 451 Bishop St., N.W., Suite B, Atlanta, Ga., 30318, USA. Similar analyses were conducted for the other organisms using publicly available and proprietary databases.

[0692] Homologous coding nucleic acids and the homologous polypeptides which they encode can be identified using a “reciprocal” best-hit analysis. To facilitate the identification of homologous coding nucleic acids and homologous polypeptides, paralogous genes within each of 51 organisms were identified and clustered prior to comparison to other organisms. Briefly, the polypeptide sequence of each polypeptide encoded by each open reading frame (ORF) in a given organism was compared to the polypeptide sequence encoded by every other ORF for that organism for each of the 51 pathogenic organisms (PathoSeq September 2001 release) using BLASTP 2.09 algorithm without filtering. Simultaneously, the polypeptide sequence encoded by each ORF of an organism was compared to the polypeptide sequences encoded by each of the ORFs in the remaining 51 organisms. Those polypeptides within a single organism that shared a higher degree of sequence identity to one another than to polypeptide sequences obtained from any other organisms were clustered as “paralog”. sequences for “reciprocal” best-hit analysis.

[0693] For each reference organism, the 50 homologous coding nucleic acids (and the 50 homologous polypeptides which they encode) were determined by identifying the ORFs in each of the 50 comparison organisms which encode a polypeptide sharing the highest degree of amino acid sequence identity to the polypeptide encoded by the ORF from the reference organism. The accuracy of the identification of the predicted homologous coding nucleic acids (and the homologous polypeptides which they encode) was confirmed by a “reciprocal” BLAST analysis in which the polypeptide sequence of the predicted homologous polypeptide was compared against the polypeptides encoded by each of the ORFs in the reference organism using BLASTP 2.09 algorithm without filtering. Only those polypeptides that shared the highest degree of amino acid sequence identity in each portion of the two-way comparison were retained for further analysis.

[0694] Amino acid identity or similarity can also be determined using the FASTA version 3.0t78 algorithm with the default parameters. Alternatively, protein identity or similarity may be identified using BLASTP with the default parameters, BLASTX with the default parameters, or TBLASTN with the default parameters. (Altschul, S. F. et al. Gapped BLAST and PSI-BLAST: A New Generation of Protein Database Search Programs, Nucleic Acid Res. 25: 3389-3402 (1997), the disclosure of which is incorporated herein by reference in its entirety).

[0695] Nucleotide identity can be measured using BLASTN version 2.0 with the default parameters or tBLASTX with the default parameters. (Altschul, S. F. et al. Gapped BLAST and PSI-BLAST: A New Generation of Protein Database Search Programs, Nucleic Acid Res. 25: 3389-3402 (1997), the disclosure of which is incorporated herein by reference in its entirety). Alternatively a gene can be classified into a cluster of orthologous groups (COG) by using the COGNITOR program available at the above web site, or by direct BLASTP comparison of the gene of interest to the members of the COGs and analysis of these results as described by Tatusov, R. L., Galperin, M. Y., Natale, D. A. and Koonin, E. V. (2000) The COG database: a tool for genome-scale analysis of protein functions and evolution. Nucleic Acids Research v. 28 n. 1, pp33-36, the disclosure of which is incorporated herein by reference in its entirety. Several genes homologous to genes contained the operons of SEQ ID NOs: 1-194 and several polypeptides homologous to polypeptides encoded by gene contained in the operons of SEQ ID NOs: 1-194 are described in U.S. patent application Ser. No. 10/282,122, entitled IDENTIFICATION OF ESSENTIAL GENES IN MICROORGANISMS, filed Oct. 25, 2002, the disclosure of which is incorporated herein by reference in its entirety.

[0696] The following Examples demonstrate methods used to identify proliferation-required operons that contain one or more of the identified proliferation-required genes.

### Example 7

### Prediction of Proliferation-Required Operons in Staphylococcus aureus

[0697] Operons containing one or more of the of the genes identified as being required for proliferation in Staphylococcus aureus Mu50 were identified using the operon prediction methods described herein.

[0698] The methods of operon prediction described herein were used to predict over 1397 operons from the protein-encoding genes in the genome of Staphylococcus aureus strain Mu50. Of the identified operons, approximately 62% were predicted to be monocistronic and approximately 38% were predicted to be polycistronic. Of the 1397 operons predicted, 194 of these operons were found to comprise at least one gene proliferation-required gene. Each of these proliferation-required operons predicted from Staphylococcus aureus is listed in Table V. In a few instances, the above prediction method resulted in very similar high scores for two or more distinct operon constructions. This result is likely due to naturally occurring differential termination within a single operon which results in the prediction of the full-length operon as well as one or more shorter operon sequences.

[0699] Starting from the left of Table V, the first column lists the SEQ ID NO for each nucleotide sequence for each predicted operon. The second column indicates the chromosomal strand which corresponds to the coding strand of the operon. The start and stop locations, with reference to the position on the standardized Staphylococcus aureus Mu 50 chromosomal map, are provided in the third and fourth columns. The final column provides the generic name for each gene contained within the operon.

TABLE V
Proliferation-Required Operons from Staphylococcus aureus

| | | Start- | Stop- | |
|---|---|---|---|---|
| SeqId | Strand | Location | Location | OperonMember |
| 1 | + | 3670 | 9674 | SAV0003, recF, gyrB, gyrA |
| 2 | + | 521792 | 525676 | treP, SAV0475, SAV0476 |
| 3 | + | 526319 | 529619 | SAV0477, dnaX, SAV0479, recR |
| 4 | + | 536410 | 543112 | SAV0481, tmk, SAV0483, holB, SAV0485, SAV0486, SAV0487, SAV0488, SAV0489 |
| 5 | + | 543397 | 548143 | metS, SAV0491, SAV0492, ksgA, veg |
| 6 | + | 543397 | 546174 | metS, SAV0491 |
| 7 | + | 543397 | 547772 | metS, SAV0491, SAV0492, ksgA |
| 8 | + | 554895 | 569447 | pth, mfd, SAV0504, SAV0505, SAV0506, SAV0507, SAV0508, SAV0509, SAV0510, ftsH, SAV0512, |
| | | | | cysK |
| 9 | + | 554895 | 562858 | pth, mfd, SAV0504, SAV0505, SAV0506, SAV0507, SAV0508 |
| 10 | + | 563038 | 568336 | SAV0509, SAV0510, ftsH, SAV0512 |
| 11 | + | 563038 | 564877 | SAV0509, SAV0510 |
| 12 | + | 569663 | 571282 | folP, folB, folK |
| 13 | + | 573866 | 579838 | rRNA-5S, tRNA-Val, tRNA-Thr, tRNA-Lys, tRNA-Gly, tRNA-Leu, tRNA-Arg, tRNA-Pro, tRNA-Ala, |
| | | | | rRNA-16S, tRNA-Ile, rRNA-23S, rRNA-5S |
| 14 | + | 594778 | 599127 | cysE, cysS, SAV0531, SAV0532, SAV0533 |
| 15 | + | 594778 | 598477 | cysE, cysS, SAV0531, SAV0532 |
| 16 | + | 600322 | 616222 | SAV0536, rplK, rplA, rplJ, rplL, SAV0541, rpoB, rpoC, SAV0544, rpsL, rpsG, fus, tufA |
| 17 | + | 600322 | 602870 | SAV0536, rplK, rplA, rplJ, rplL |
| 18 | + | 603868 | 611179 | rpoB, rpoC |
| 19 | + | 611668 | 616222 | rpsL, rpsG, fus, tufA |
| 20 | + | 662589 | 664414 | pta, SAV0589 |
| 21 | + | 665082 | 667998 | mvaK1, mvaD, mvaK2 |
| 22 | + | 681080 | 683166 | SAV0606, argS |
| 23 | − | 704990 | 707489 | SAV0633, SAV0632, SAV0631 |
| 24 | + | 770582 | 774224 | SAV0698, fruB, fruA |
| 25 | + | 807305 | 810860 | nrdI, nrdE, nrdF |
| 26 | − | 815371 | 816626 | SAV0738, SAV0737 |
| 27 | + | 842639 | 847358 | hprK, lgt, SAV0762, SAV0763, trxB |
| 28 | + | 855814 | 863055 | gapR, gap, pgk, tpi, pgm, eno |
| 29 | + | 962954 | 965075 | SAV0919, SAV0920 |
| 30 | + | 1006830 | 1016883 | SAV0963, spsA, spsB, SAV0966, SAV0967, SAV0968 |
| 31 | + | 1006830 | 1008525 | SAV0963, spsA, spsB |
| 32 | + | 1031458 | 1033655 | fabH, SAV0984 |
| 33 | + | 1034324 | 1040023 | oppB, SAV0987, oppD, oppF, SAV0990 |
| 34 | + | 1054132 | 1061116 | SAV1005, SAV1006, SAV1007, SAV1008, SAV1009, SAV1010, fabI |
| 35 | + | 1068803 | 1070746 | murE, SAV1019, SAV1020 |
| 36 | − | 1078988 | 1079153 | tRNA-Asn, tRNA-Ser |
| 37 | + | 1135082 | 1136850 | SAV1081, SAV1082 |
| 38 | + | 1137004 | 1138991 | ptsH, ptsI |
| 39 | − | 1143077 | 1144946 | SAV1090, SAV1089 |
| 40 | + | 1177683 | 1178709 | SAV1124, SAV1125 |
| 41 | + | 1190656 | 1194116 | pheS, pheT |
| 42 | + | 1207185 | 1209080 | murI, SAV1152, SAV1153 |
| 43 | + | 1222207 | 1225891 | argF, SAV1170, SAV1171 |
| 44 | + | 1230909 | 1243344 | SAV1177, SAV1178, SAV1179, ftsL, pbpA, mraY, murD, div1b, ftsA, ftsZ |
| 45 | + | 1232666 | 1243344 | SAV1178, SAV1179, ftsL, pbpA, mraY, murD, div1b, ftsA, ftsZ |
| 46 | + | 1232666 | 1236678 | SAV1178, SAV1179, ftsL, pbpA |
| 47 | + | 1236970 | 1243344 | mraY, murD, div1b, ftsA, ftsZ |
| 48 | + | 1236970 | 1239286 | mraY, murD |
| 49 | + | 1239302 | 1243344 | div1b, ftsA, ftsZ |
| 50 | + | 1267422 | 1272086 | gmk, SAV1210, SAV1211, priA |
| 51 | + | 1274210 | 1283164 | SAV1215, SAV1216, SAV1217, SAV1218, SAV1219, SAV1220, SAV1221, cfxE, SAV1223 |
| 52 | + | 1284176 | 1291873 | SAV1225, SAV1226, recG, SAV1228, plsX, fabD, fabG |
| 53 | + | 1286401 | 1291873 | recG, SAV1228, plsX, fabD, fabG |
| 54 | + | 1288679 | 1291873 | SAV1228, plsX, fabD, fabG |
| 55 | + | 1292308 | 1300063 | hmrB, rnc, smc, SAV1235, SAV1236, ffh |
| 56 | + | 1292308 | 1292541 | hmrB |
| 57 | + | 1292657 | 1300063 | rnc, smc, SAV1235, SAV1236, ffh |
| 58 | + | 1300498 | 1302655 | rpsP, rimM, trmD, rplS |
| 59 | + | 1305906 | 1307541 | SAV1243, rnhB |
| 60 | + | 1317539 | 1321244 | xerC, clpQ, clpY, codY |
| 61 | + | 1321591 | 1324853 | rpsB, SAV1257, smbA, frr |
| 62 | + | 1325226 | 1339274 | uppS, cdsA, SAV1262, proS, polC, SAV1265, nusA, SAV1267, SAV1268, infB |
| 63 | + | 1325226 | 1334580 | uppS, cdsA, SAV1262, proS, polC |
| 64 | + | 1334870 | 1339274 | SAV1265, nusA, SAV1267, SAV1268, infB |
| 65 | + | 1339660 | 1342466 | rbfA, truB, ribC, rpsO |
| 66 | + | 1347097 | 1353467 | spoIIIE, SAV1277, SAV1278, SAV1279, SAV1280 |
| 67 | + | 1380432 | 1384897 | SAV1307, SAV1308, glnR, glnA |
| 68 | + | 1380432 | 1382927 | SAV1307, SAV1308 |
| 69 | + | 1430727 | 1435126 | parE, parC |
| 70 | − | 1466891 | 1471456 | SAV1389, SAV1388, SAV1387, pstB, SAV1385 |
| 71 | + | 17319 | 23732 | SAV0013, SAV0014, rplI, dnaC, purA |
| 72 | + | 17319 | 22171 | SAV0013, SAV0014, rplI, dnaC |
| 73 | − | 1501456 | 1503678 | SAV1419, murG, SAV1417 |
| 74 | − | 1505760 | 1510022 | thyA, dfrA, SAV1425, SAV1424, SAV1423, SAV1422, SAV1421 |
| 75 | + | 1562515 | 1565321 | recU, pbp2 |
| 76 | − | 1569510 | 1575534 | SAV1458, SAV1457, SAV1456, dinG |
| 77 | − | 1583551 | 1586762 | SAV1472, gerCB, gerCC, ndk, SAV1468, SAV1467 |
| 78 | − | 1587636 | 1591358 | SAV1476, SAV1475, gpsA |
| 79 | − | 1587636 | 1589961 | SAV1475, gpsA |
| 80 | − | 1627042 | 1629649 | SAV1512, gnd |
| 81 | − | 1632000 | 1636699 | SAV1518, bfmBAA, bfmBAB, bmfBB |
| 82 | − | 1639429 | 1644510 | accB, accC, SAV1525, SAV1524, SAV1523, SAV1522, ispA |
| 83 | − | 1667591 | 1676522 | SAV1564, SAV1563, dnaG, sigA, SAV1560, SAV1559, SAV1558, SAV1557 |
| 84 | − | 1671862 | 1676522 | SAV1564, SAV1563, dnaG, sigA |
| 85 | − | 1667591 | 1671731 | SAV1560, SAV1559, SAV1558, SAV1557 |
| 86 | − | 1678398 | 1682249 | phoH, SAV1570, SAV1569, cdd, bex, SAV1566 |
| 87 | − | 1685671 | 1694755 | hemN, hrcA, grpE, dnaK, dnaJ, SAV1578, SAV1577, SAV1576 |
| 88 | − | 1697786 | 1707969 | pfs, SAV1598, SAV1597, aroE, SAV1595, SAV1594, SAV1593, SAV1592, SAV1591, SAV1590, |
| | | | | comEB, SAV1588, SAV1587 |
| 89 | − | 1717660 | 1721631 | SAV1614, SAV1613, SAV1612, udk, greA |
| 90 | − | 1721916 | 1725624 | alaS, SAV1617, SAV1616, SAV1615 |
| 91 | − | 1722994 | 1725624 | alaS |
| 92 | − | 1721916 | 1722931 | SAV1617, SAV1616, SAV1615 |
| 93 | − | 1729809 | 1732070 | SAV1622, SAV1621 |
| 94 | − | 1737277 | 1740321 | hisS, aspS |
| 95 | − | 1744736 | 1756186 | obg, SAV1643, ruvA, ruvB, queA, tgt, SAV1638, secF, SAV1636, apt |
| 96 | − | 1756540 | 1757470 | rplU, SAV1646, rpmA |
| 97 | − | 1767593 | 1773035 | valS, folC, SAV1661, truncated-radC |
| 98 | − | 1774221 | 1787036 | SAV1677, SAV1676, tig, clpX, SAV1673, hemA, hemX, hemC, hemD, hemB, hemL, SAV1666, |
| | | | | SAV1665 |
| 99 | − | 1775490 | 1787036 | SAV1677, SAV1676, tig, clpX, SAV1673, hemA, hemX, hemC, hemD, hemB, hemL |
| 100 | − | 1781859 | 1787036 | SAV1677, SAV1676, tig, clpX, SAV1673 |
| 101 | − | 1787178 | 1788328 | infC, rpmI, rplT |
| 102 | − | 1792834 | 1795625 | SAV1686, dnaB, dnaI |
| 103 | − | 1795836 | 1801188 | polA, SAV1689, SAV1688, gapB |
| 104 | − | 1810718 | 1813420 | pfk, pykA |
| 105 | − | 1815254 | 1817055 | SAV1701, accA |
| 106 | + | 167374 | 183942 | capA, capB, capC, capD, capE, capF, capG, capH, capI, capJ, capK, capL, capM, capN, capO, capP |
| 107 | − | 1818929 | 1823088 | SAV1704, dnaE |
| 108 | − | 1865490 | 1875703 | SAV1745, SAV1744, SAV1743, SAV1742, SAV1741, murC, SAV1739, SAV1738 |
| 109 | − | 1867487 | 1875703 | SAV1745, SAV1744, SAV1743, SAV1742, SAV1741, murC |
| 110 | − | 1882358 | 1885150 | SAV1754, SAV1753, SAV1752 |
| 111 | + | 1885515 | 1886706 | SAV1755, SAV1756 |
| 112 | − | 1893708 | 1896455 | leuS, SAV1759 |
| 113 | − | 1959708 | 1960455 | tRNA-Met, tRNA, tRNA-Phe, tRNA-His, tRNA-Gly, tRNA-Asn, tRNA-Glu, tRNA-Ser |
| 114 | + | 24161 | 24315 | tRNA-Glu, tRNA-Asp |
| 115 | − | 1994154 | 1994350 | tRNA-Gly, tRNA-Leu |
| 116 | − | 1994457 | 2001747 | rRNA-16S, tRNA-Ile, tRNA-Ala, 23S-rRNA, rRNA-5S, tRNA-Val, tRNA-Thr, tRNA-Lys, tRNA-Leu, |
| | | | | tRNA-Gly, tRNA-Leu, tRNA-Arg, tRNA-Pro, tRNA-Ala, tRNA-Met, tRNA-Met, tRNA-Ser, tRNA-Asp, |
| | | | | tRNA-Ser, tRNA-Met, tRNA-Asp, tRNA-Phe, tRNA-Thr, tRNA-Tyr, tRNA-Trp, tRNA-His, tRNA-Gln, |
| | | | | tRNA-Cys, tRNA-Gly |
| 117 | − | 2030928 | 2032974 | SAV1892, SAV1891 |
| 118 | − | 2036795 | 2039184 | SAV1898, SAV1897 |
| 119 | − | 2039952 | 2043153 | SAV1901, SAV1900, SAV1899 |
| 120 | − | 2045147 | 2051247 | pcrB, pcrA, dnlJ, SAV1903 |
| 121 | − | 2056827 | 2059110 | SAV1913, nadE |
| 122 | + | 2064607 | 2066149 | SAV1918, SAV1919 |
| 123 | − | 2148841 | 2150817 | groES, groEL |
| 124 | − | 2190799 | 2190973 | tRNA-Leu, tRNA-Gly |
| 125 | − | 2197673 | 2202397 | SAV2074, SAV2073, SAV2072, dpj, air, SAV2069, SAV2068 |
| 126 | − | 2214440 | 2216883 | ddlA, murF |
| 127 | − | 2222584 | 2226472 | SAV2094, thiD, thiM, thiE, SAV2090 |
| 128 | − | 2222584 | 2223456 | SAV2090 |
| 129 | − | 2229031 | 2231115 | SAV2101, murA, murA, SAV2098 |
| 130 | − | 2231677 | 2238577 | SAV2110, atpB, atpE, atpF, atpH, atpA, atpG, atpD, atpC |
| 131 | − | 2238744 | 2242341 | SAV2114, glyA, upp, mnaA |
| 132 | − | 2242448 | 2246493 | tdk, prfA, SAV2117, SAV2116, SAV2115 |
| 133 | − | 2250440 | 2252123 | murZ, SAV2123 |
| 134 | − | 2250864 | 2252123 | murZ |
| 135 | − | 2295658 | 2298783 | SAV2163, SAV2162, glmM(femD) |
| 136 | − | 2300018 | 2305665 | rRNA-16S, rRNA-23S, rRNA-5S, tRNA-Asn, tRNA-Glu, tRNA-Val, tRNA-Tyr, tRNA-Gln, tRNA-Lys |
| 137 | − | 2359399 | 2363758 | SAV2222, SAV2221, SAV2220, truA, rplM, rpsI |
| 138 | − | 2364296 | 2378211 | rpsJ, rplC, rplD, rplW, rplB, rpsS, rplV, rpsC, rplP, rpmC, rpsQ, rplN, rplX, rplE, rpsN, rpsH, rplF, rplR, |
| | | | | rpsE, rpmD, rplO, secY, adk, infA, rpmJ, rpsM, rpsK, rpoA, rplQ |
| 139 | + | 24929 | 29591 | vicR, vicK, SAV0020, SAV0021 |
| 140 | − | 2470474 | 2472501 | SAV2347, fni |
| 141 | − | 2764088 | 2766471 | nrdD, SAV2616 |
| 142 | + | 285731 | 292354 | SAV0244, SAV0245, SAV0246, gatC, SAV0248, SAV0249, SAV0250 |
| 143 | + | 517 | 3289 | dnaA, dnaN |
| 144 | + | 292882 | 296332 | SAV0251, SAV0252, SAV0253 |
| 145 | + | 551317 | 554584 | gcaD, prs, rplY |
| 146 | + | 1312537 | 1317121 | SAV1249, SAV1250, gid |
| 147 | − | 1662306 | 1665101 | sodA, pbp3 |
| 148 | − | 1662306 | 1664381 | pbp3 |
| 149 | + | 1838194 | 1839504 | SAV1718, rpsD |
| 150 | + | 298205 | 303403 | SAV0255, SAV0256, SAV0257, SAV0258 |
| 151 | − | 2877215 | 2877826 | rpmH, rnpA |
| 152 | + | 411837 | 412951 | rpsF, ssb, rpsR |
| 153 | − | 2687157 | 2688434 | mvaA |
| 154 | + | 2855908 | 2856864 | SAV2689 |
| 155 | + | 2570287 | 2572365 | SAV2439 |
| 156 | + | 2217201 | 2218403 | SAV2084 |
| 157 | − | 2252589 | 2253449 | fbaA |
| 158 | − | 2256243 | 2256773 | rpoE |
| 159 | − | 2279873 | 2281678 | glmS |
| 160 | − | 2380594 | 2382729 | topB |
| 161 | − | 2390725 | 2391990 | fmhB |
| 162 | − | 2185545 | 2190678 | rRNA-16S, rRNA-23S, rRNA-5S |
| 163 | − | 2027584 | 2028342 | map |
| 164 | − | 1850510 | 1851772 | tyrS |
| 165 | − | 1921077 | 1922273 | metK |
| 166 | − | 1836363 | 1838057 | SAV1717 |
| 167 | − | 1848353 | 1848970 | SAV1727 |
| 168 | − | 1617898 | 1618818 | SAV1504 |
| 169 | + | 1619131 | 1620615 | SAV1505 |
| 170 | + | 1676857 | 1678248 | glyS |
| 171 | − | 1685202 | 1685378 | rpsU |
| 172 | − | 1790484 | 1792421 | thrS |
| 173 | + | 1410706 | 1410975 | rpsN |
| 174 | − | 1567896 | 1569188 | asnS |
| 175 | − | 1587193 | 1587465 | hu |
| 176 | + | 1345167 | 1346840 | SAV1275 |
| 177 | − | 1145474 | 1146025 | pdf1 |
| 178 | + | 1165912 | 1167033 | SAV1113 |
| 179 | − | 1228583 | 1228656 | tRNA-Arg |
| 180 | + | 1005174 | 1006505 | pgi |
| 181 | − | 1045860 | 1046849 | trpS |
| 182 | − | 755146 | 756021 | bacA |
| 183 | + | 778476 | 779459 | SAV0704 |
| 184 | + | 819167 | 820291 | SAV0742 |
| 185 | + | 830606 | 833137 | secA |
| 186 | + | 833570 | 834562 | prfB |
| 187 | − | 851567 | 851638 | tRNA-Arg |
| 188 | + | 521231 | 521320 | tRNA-Ser |
| 189 | + | 530479 | 535507 | rRNA-16S, rRNA-23S, rRNA-5S |
| 190 | + | 592895 | 594349 | gltX |
| 191 | + | 12793 | 14079 | serS |
| 192 | + | 1243604 | 1250453 | SAV1187, SAV1188, SAV1189, SAV1190, SAV1191, SAV1192, ileS |
| 193 | + | 1243604 | 1247479 | SAV1187, SAV1188, SAV1189, SAV1190, SAV1191, SAV1192 |
| 194 | + | 1247700 | 1250453 | ileS |

[0700] Comparison of the predicted operons listed in Table V with experimentally determined values for Staphylococcus aureus operons from literature sources indicated that the disclosed methods successfully predicted operon boundaries and genes contained within the each operon interior with a high degree of accuracy.

[0701] For each of the Staphylococcus aureus operons that are listed in Table V (SEQ ID NOs: 1-194), Table VI indicates which gene or genes are required for proliferation. The proliferation-required genes displayed in Table VI are listed by both their generic gene name (EEG_GeneName) and their SEQ ID NO (EEG_DNASeqID). In those instances where the proliferation-required gene encodes a protein product, the SEQ ID NO of the encoded polypeptide is also included (EEG_PrtSeqID). For example, Table VI indicates that the proliferation-required gene gyrB, which has the nucleotide sequence of SEQ ID NO: 201, is contained in the operon having the nucleotide sequence of SEQ ID NO: 1 and encodes the polypeptide having the amino acid sequence of SEQ ID NO: 551.

TABLE VI
Proliferation-Required Genes Contained in Proliferation-Required
Operons and Proliferation-Required Polypeptides Encoded
by the Proliferation-Required Genes

| OperonSeqID | EEG_PathoSeqID | EEG_GeneName | EEG_DNASeqID | EEG_PrtSeqID |
|---|---|---|---|---|
| 1 | SAU800005 | gyrB | 201 | 551 |
| 1 | SAU800006 | gyrA | 202 | 552 |
| 2 | SAU800475 | SAV0475 | 203 | 553 |
| 3 | SAU800478 | dnaX | 204 | 554 |
| 3 | SAU800479 | SAV0479 | 205 | 555 |
| 4 | SAU800482 | tmk | 206 | 556 |
| 4 | SAU800484 | holB | 207 | 557 |
| 4 | SAU800489 | SAV0489 | 208 | 558 |
| 5 | SAU800490 | metS | 209 | 559 |
| 6 | SAU800490 | metS | 209 | 559 |
| 7 | SAU800490 | metS | 209 | 559 |
| 8 | SAU800502 | pth | 210 | 560 |
| 8 | SAU800506 | SAV0506 | 211 | 561 |
| 8 | SAU800507 | SAV0507 | 212 | 562 |
| 8 | SAU800509 | SAV0509 | 213 | 563 |
| 8 | SAU800510 | SAV0510 | 214 | 564 |
| 9 | SAU800502 | pth | 210 | 560 |
| 9 | SAU800506 | SAV0506 | 211 | 561 |
| 9 | SAU800507 | SAV0507 | 212 | 562 |
| 10 | SAU800509 | SAV0509 | 213 | 563 |
| 10 | SAU800510 | SAV0510 | 214 | 564 |
| 11 | SAU800509 | SAV0509 | 213 | 563 |
| 11 | SAU800510 | SAV0510 | 214 | 564 |
| 12 | SAU800514 | folP | 215 | 565 |
| 12 | SAU800515 | folB | 216 | 566 |
| 12 | SAU800516 | folK | 217 | 567 |
| 13 | SAU802716 | rRNA-5S | 218 | |
| 13 | SAU802749 | tRNA-Val | 219 | |
| 13 | SAU802767 | tRNA-Thr | 220 | |
| 13 | SAU802784 | tRNA-Lys | 221 | |
| 13 | SAU802725 | tRNA-Gly | 222 | |
| 13 | SAU802742 | tRNA-Leu | 223 | |
| 13 | SAU802760 | tRNA-Arg | 224 | |
| 13 | SAU802773 | tRNA-Pro | 225 | |
| 13 | SAU802717 | tRNA-Ala | 226 | |
| 13 | SAU802734 | rRNA-16S | 227 | |
| 13 | SAU802754 | tRNA-Ile | 228 | |
| 13 | SAU802788 | rRNA-23S | 229 | |
| 13 | SAU802745 | rRNA-5S | 230 | |
| 14 | SAU800530 | cysS | 231 | 568 |
| 15 | SAU800530 | cysS | 231 | 568 |
| 16 | SAU800537 | rplK | 232 | 569 |
| 16 | SAU800539 | rplJ | 233 | 570 |
| 16 | SAU800540 | rplL | 234 | 571 |
| 16 | SAU800542 | rpoB | 235 | 572 |
| 16 | SAU800543 | rpoC | 236 | 573 |
| 16 | SAU800545 | rpsL | 237 | 574 |
| 16 | SAU800546 | rpsG | 238 | 575 |
| 16 | SAU800547 | fus | 239 | 576 |
| 16 | SAU800548 | tufA | 240 | 577 |
| 17 | SAU800537 | rplK | 232 | 569 |
| 17 | SAU800539 | rplJ | 233 | 570 |
| 17 | SAU800540 | rplL | 234 | 571 |
| 18 | SAU800542 | rpoB | 235 | 572 |
| 18 | SAU800543 | rpoC | 236 | 573 |
| 19 | SAU800545 | rpsL | 237 | 574 |
| 19 | SAU800546 | rpsG | 238 | 575 |
| 19 | SAU800547 | fus | 239 | 576 |
| 19 | SAU800548 | tufA | 240 | 577 |
| 20 | SAU800588 | pta | 241 | 578 |
| 21 | SAU800590 | mvaK1 | 242 | 579 |
| 21 | SAU800591 | mvaD | 243 | 580 |
| 21 | SAU800592 | mvaK2 | 244 | 581 |
| 22 | SAU800607 | argS | 245 | 582 |
| 23 | SAU800633 | SAV0633 | 246 | 583 |
| 24 | SAU800698 | SAV0698 | 247 | 584 |
| 25 | SAU800731 | nrdE | 248 | 585 |
| 25 | SAU800732 | nrdF | 249 | 586 |
| 26 | SAU800738 | SAV0738 | 250 | 587 |
| 27 | SAU800760 | hprK | 251 | 588 |
| 27 | SAU800764 | trxB | 252 | 589 |
| 28 | SAU800772 | gap | 253 | 590 |
| 28 | SAU800773 | pgk | 254 | 591 |
| 28 | SAU800774 | tpi | 255 | 592 |
| 28 | SAU800776 | eno | 256 | 593 |
| 29 | SAU800920 | SAV0920 | 257 | 594 |
| 30 | SAU800965 | spsB | 258 | 595 |
| 31 | SAU800965 | spsB | 258 | 595 |
| 32 | SAU800983 | fabH | 259 | 596 |
| 32 | SAU800984 | SAV0984 | 260 | 597 |
| 33 | SAU800989 | oppF | 261 | 598 |
| 34 | SAU801007 | SAV1007 | 262 | 599 |
| 34 | SAU801011 | fabI | 263 | 600 |
| 35 | SAU801018 | murE | 264 | 601 |
| 36 | SAU802752 | tRNA-Asn | 265 | |
| 36 | SAU802738 | tRNA-Ser | 266 | |
| 37 | SAU801081 | SAV1081 | 267 | 602 |
| 38 | SAU801083 | ptsH | 268 | 603 |
| 38 | SAU801084 | ptsI | 269 | 604 |
| 39 | SAU801089 | SAV1089 | 270 | 605 |
| 40 | SAU801124 | SAV1124 | 271 | 606 |
| 40 | SAU801125 | SAV1125 | 272 | 607 |
| 41 | SAU801138 | pheS | 273 | 608 |
| 41 | SAU801139 | pheT | 274 | 609 |
| 42 | SAU801151 | murI | 275 | 610 |
| 42 | SAU801152 | SAV1152 | 276 | 611 |
| 43 | SAU801170 | SAV1170 | 277 | 612 |
| 44 | SAU801179 | SAV1179 | 278 | 613 |
| 44 | SAU801180 | ftsL | 279 | 614 |
| 44 | SAU801181 | pbpA | 280 | 615 |
| 44 | SAU801182 | mraY | 281 | 616 |
| 44 | SAU801183 | murD | 282 | 617 |
| 44 | SAU801185 | ftsA | 283 | 618 |
| 44 | SAU801186 | ftsZ | 284 | 619 |
| 45 | SAU801179 | SAV1179 | 278 | 613 |
| 45 | SAU801180 | ftsL | 279 | 614 |
| 45 | SAU801181 | pbpA | 280 | 615 |
| 45 | SAU801182 | mraY | 281 | 616 |
| 45 | SAU801183 | murD | 282 | 617 |
| 45 | SAU801185 | ftsA | 283 | 618 |
| 45 | SAU801186 | ftsZ | 284 | 619 |
| 46 | SAU801179 | SAV1179 | 278 | 613 |
| 46 | SAU801180 | ftsL | 279 | 614 |
| 46 | SAU801181 | pbpA | 280 | 615 |
| 47 | SAU801182 | mraY | 281 | 616 |
| 47 | SAU801183 | murD | 282 | 617 |
| 47 | SAU801185 | ftsA | 283 | 618 |
| 47 | SAU801186 | ftsZ | 284 | 619 |
| 48 | SAU801182 | mraY | 281 | 616 |
| 48 | SAU801183 | murD | 282 | 617 |
| 49 | SAU801185 | ftsA | 283 | 618 |
| 49 | SAU801186 | ftsZ | 284 | 619 |
| 50 | SAU801209 | gmk | 285 | 620 |
| 51 | SAU801216 | SAV1216 | 286 | 621 |
| 51 | SAU801219 | SAV1219 | 287 | 622 |
| 51 | SAU801223 | SAV1223 | 288 | 623 |
| 52 | SAU801230 | fabD | 289 | 624 |
| 52 | SAU801231 | fabG | 290 | 625 |
| 53 | SAU801230 | fabD | 289 | 624 |
| 53 | SAU801231 | fabG | 290 | 625 |
| 54 | SAU801230 | fabD | 289 | 624 |
| 54 | SAU801231 | fabG | 290 | 625 |
| 55 | SAU801232 | hmrB | 291 | 626 |
| 55 | SAU801233 | rnc | 292 | 627 |
| 55 | SAU801234 | smc | 293 | 628 |
| 55 | SAU801235 | SAV1235 | 294 | 629 |
| 56 | SAU801232 | hmrB | 291 | 626 |
| 57 | SAU801233 | rnc | 292 | 627 |
| 57 | SAU801234 | smc | 293 | 628 |
| 57 | SAU801235 | SAV1235 | 294 | 629 |
| 58 | SAU801238 | rpsP | 295 | 630 |
| 58 | SAU801240 | trmD | 296 | 631 |
| 58 | SAU801241 | rplS | 297 | 632 |
| 59 | SAU801243 | SAV1243 | 298 | 633 |
| 60 | SAU801252 | xerC | 299 | 634 |
| 61 | SAU801256 | rpsB | 300 | 635 |
| 61 | SAU801257 | SAV1257 | 301 | 636 |
| 61 | SAU801258 | smbA | 302 | 637 |
| 61 | SAU801259 | frr | 303 | 638 |
| 62 | SAU801260 | uppS | 304 | 639 |
| 62 | SAU801263 | proS | 305 | 640 |
| 62 | SAU801264 | polC | 306 | 641 |
| 62 | SAU801266 | nusA | 307 | 642 |
| 62 | SAU801267 | SAV1267 | 308 | 643 |
| 62 | SAU801269 | infB | 309 | 644 |
| 63 | SAU801260 | uppS | 304 | 639 |
| 63 | SAU801263 | proS | 305 | 640 |
| 63 | SAU801264 | polC | 306 | 641 |
| 64 | SAU801266 | nusA | 307 | 642 |
| 64 | SAU801267 | SAV1267 | 308 | 643 |
| 64 | SAU801269 | infB | 309 | 644 |
| 65 | SAU801272 | ribC | 310 | 645 |
| 66 | SAU801280 | SAV1280 | 311 | 646 |
| 67 | SAU801307 | SAV1307 | 312 | 647 |
| 68 | SAU801307 | SAV1307 | 312 | 647 |
| 69 | SAU801354 | parE | 313 | 648 |
| 69 | SAU801355 | parC | 314 | 649 |
| 70 | SAU801389 | SAV1389 | 315 | 650 |
| 70 | SAU801388 | SAV1388 | 316 | 651 |
| 71 | SAU800016 | dnaC | 317 | 652 |
| 72 | SAU800016 | dnaC | 317 | 652 |
| 73 | SAU801418 | murG | 318 | 653 |
| 74 | SAU801427 | thyA | 319 | 654 |
| 74 | SAU801426 | dfrA | 320 | 655 |
| 75 | SAU801449 | recU | 321 | 656 |
| 76 | SAU801458 | SAV1458 | 322 | 657 |
| 76 | SAU801457 | SAV1457 | 323 | 658 |
| 77 | SAU801470 | gerCC | 324 | 659 |
| 78 | SAU801475 | SAV1475 | 325 | 660 |
| 79 | SAU801475 | SAV1475 | 325 | 660 |
| 80 | SAU801511 | gnd | 326 | 661 |
| 81 | SAU801518 | SAV1518 | 327 | 662 |
| 81 | SAU801516 | bfmBAB | 328 | 663 |
| 82 | SAU801527 | accB | 329 | 664 |
| 82 | SAU801526 | accC | 330 | 665 |
| 82 | SAU801524 | SAV1524 | 331 | 666 |
| 83 | SAU801562 | dnaG | 332 | 667 |
| 83 | SAU801561 | sigA | 333 | 668 |
| 83 | SAU801560 | SAV1560 | 334 | 669 |
| 83 | SAU801558 | SAV1558 | 335 | 670 |
| 84 | SAU801562 | dnaG | 332 | 667 |
| 84 | SAU801561 | sigA | 333 | 668 |
| 85 | SAU801560 | SAV1560 | 334 | 669 |
| 85 | SAU801558 | SAV1558 | 335 | 670 |
| 86 | SAU801567 | bex | 336 | 671 |
| 87 | SAU801581 | grpE | 337 | 672 |
| 87 | SAU801580 | dnaK | 338 | 673 |
| 88 | SAU801598 | SAV1598 | 339 | 674 |
| 88 | SAU801597 | SAV1597 | 340 | 675 |
| 88 | SAU801596 | aroE | 341 | 676 |
| 88 | SAU801594 | SAV1594 | 342 | 677 |
| 88 | SAU801587 | SAV1587 | 343 | 678 |
| 89 | SAU801610 | greA | 344 | 679 |
| 90 | SAU801618 | alaS | 345 | 680 |
| 90 | SAU801616 | SAV1616 | 346 | 681 |
| 91 | SAU801618 | alaS | 345 | 680 |
| 92 | SAU801616 | SAV1616 | 346 | 681 |
| 93 | SAU801622 | SAV1622 | 347 | 682 |
| 93 | SAU801621 | SAV1621 | 348 | 683 |
| 94 | SAU801631 | hisS | 349 | 684 |
| 95 | SAU801644 | obg | 350 | 685 |
| 95 | SAU801642 | ruvA | 351 | 686 |
| 95 | SAU801641 | ruvB | 352 | 687 |
| 96 | SAU801647 | rplU | 353 | 688 |
| 96 | SAU801645 | rpmA | 354 | 689 |
| 97 | SAU801663 | valS | 355 | 690 |
| 98 | SAU801674 | clpX | 356 | 691 |
| 98 | SAU801673 | SAV1673 | 357 | 692 |
| 99 | SAU801674 | clpX | 356 | 691 |
| 99 | SAU801673 | SAV1673 | 357 | 692 |
| 100 | SAU801674 | clpX | 356 | 691 |
| 100 | SAU801673 | SAV1673 | 357 | 692 |
| 101 | SAU801680 | infC | 358 | 693 |
| 101 | SAU801678 | rplT | 359 | 694 |
| 102 | SAU801685 | dnaB | 360 | 695 |
| 102 | SAU801684 | dnaI | 361 | 696 |
| 103 | SAU801690 | polA | 362 | 697 |
| 103 | SAU801688 | SAV1688 | 363 | 698 |
| 104 | SAU801698 | pfk | 364 | 699 |
| 104 | SAU801697 | pykA | 365 | 700 |
| 105 | SAU801701 | SAV1701 | 366 | 701 |
| 105 | SAU801700 | accA | 367 | 702 |
| 106 | SAU800152 | capD | 368 | 703 |
| 107 | SAU801703 | dnaE | 369 | 704 |
| 108 | SAU801740 | murC | 370 | 705 |
| 109 | SAU801740 | murC | 370 | 705 |
| 110 | SAU801754 | SAV1754 | 371 | 706 |
| 110 | SAU801753 | SAV1753 | 372 | 707 |
| 111 | SAU801755 | SAV1755 | 373 | 708 |
| 112 | SAU801760 | leuS | 374 | 709 |
| 113 | SAU802757 | tRNA-Met | 375 | |
| 113 | SAU802741 | tRNA | 376 | |
| 113 | SAU802724 | tRNA-Phe | 377 | |
| 113 | SAU802781 | tRNA-His | 378 | |
| 113 | SAU802765 | tRNA-Gly | 379 | |
| 113 | SAU802747 | tRNA-Asn | 380 | |
| 113 | SAU802732 | tRNA-Glu | 381 | |
| 113 | SAU802772 | tRNA-Ser | 382 | |
| 114 | SAU802761 | tRNA-Glu | 383 | |
| 114 | SAU802774 | tRNA-Asp | 384 | |
| 115 | SAU802743 | tRNA-Gly | 385 | |
| 115 | SAU802726 | tRNA-Leu | 386 | |
| 116 | SAU802715 | rRNA-16S | 387 | |
| 116 | SAU802756 | tRNA-Ile | 388 | |
| 116 | SAU802721 | tRNA-Ala | 389 | |
| 116 | SAU802723 | rRNA-23S | 390 | |
| 116 | SAU802766 | rRNA-5S | 391 | |
| 116 | SAU802748 | tRNA-Val | 392 | |
| 116 | SAU802731 | tRNA-Thr | 393 | |
| 116 | SAU802790 | tRNA-Lys | 394 | |
| 116 | SAU802771 | tRNA-Leu | 395 | |
| 116 | SAU802755 | tRNA-Gly | 396 | |
| 116 | SAU802740 | tRNA-Leu | 397 | |
| 116 | SAU802722 | tRNA-Arg | 398 | |
| 116 | SAU802778 | tRNA-Pro | 399 | |
| 116 | SAU802764 | tRNA-Ala | 400 | |
| 116 | SAU802729 | tRNA-Met | 401 | |
| 116 | SAU802787 | tRNA-Met | 402 | |
| 116 | SAU802770 | tRNA-Ser | 403 | |
| 116 | SAU802753 | tRNA-Asp | 404 | |
| 116 | SAU802739 | tRNA-Ser | 405 | |
| 116 | SAU802720 | tRNA-Met | 406 | |
| 116 | SAU802777 | tRNA-Asp | 407 | |
| 116 | SAU802763 | tRNA-Phe | 408 | |
| 116 | SAU802746 | tRNA-Thr | 409 | |
| 116 | SAU802728 | tRNA-Tyr | 410 | |
| 116 | SAU802769 | tRNA-Trp | 411 | |
| 116 | SAU802750 | tRNA-His | 412 | |
| 116 | SAU802735 | tRNA-Gln | 413 | |
| 116 | SAU802718 | tRNA-Cys | 414 | |
| 116 | SAU802775 | tRNA-Gly | 415 | |
| 117 | SAU801892 | SAV1892 | 416 | 710 |
| 117 | SAU801891 | SAV1891 | 417 | 711 |
| 118 | SAU801898 | SAV1898 | 418 | 712 |
| 119 | SAU801901 | SAV1901 | 419 | 713 |
| 119 | SAU801900 | SAV1900 | 420 | 714 |
| 119 | SAU801899 | SAV1899 | 421 | 715 |
| 120 | SAU801904 | dnlJ | 422 | 716 |
| 121 | SAU801913 | SAV1913 | 423 | 717 |
| 121 | SAU801912 | nadE | 424 | 718 |
| 122 | SAU801919 | SAV1919 | 425 | 719 |
| 123 | SAU802030 | groES | 426 | 720 |
| 123 | SAU802029 | groEL | 427 | 721 |
| 124 | SAU802785 | tRNA-Leu | 428 | |
| 124 | SAU802768 | tRNA-Gly | 429 | |
| 125 | SAU802071 | dpj | 430 | 722 |
| 125 | SAU802070 | alr | 431 | 723 |
| 126 | SAU802083 | ddlA | 432 | 724 |
| 126 | SAU802082 | murF | 433 | 725 |
| 127 | SAU802090 | SAV2090 | 434 | 726 |
| 128 | SAU802090 | SAV2090 | 434 | 726 |
| 129 | SAU802100 | murA | 435 | 727 |
| 129 | SAU802098 | SAV2098 | 436 | 728 |
| 130 | SAU802109 | atpB | 437 | 729 |
| 130 | SAU802107 | atpF | 438 | 730 |
| 130 | SAU802106 | atpH | 439 | 731 |
| 130 | SAU802105 | atpA | 440 | 732 |
| 130 | SAU802104 | atpG | 441 | 733 |
| 130 | SAU802103 | atpD | 442 | 734 |
| 130 | SAU802102 | atpC | 443 | 735 |
| 131 | SAU802112 | upp | 444 | 736 |
| 132 | SAU802118 | prfA | 445 | 737 |
| 133 | SAU802124 | murZ | 446 | 738 |
| 134 | SAU802124 | murZ | 446 | 738 |
| 135 | SAU802163 | SAV2163 | 447 | 739 |
| 135 | SAU802161 | glmM(femD) | 448 | 740 |
| 136 | SAU802733 | rRNA-16S | 449 | |
| 136 | SAU802786 | rRNA-23S | 450 | |
| 136 | SAU802751 | rRNA-5S | 451 | |
| 136 | SAU802737 | tRNA-Asn | 452 | |
| 136 | SAU802719 | tRNA-Glu | 453 | |
| 136 | SAU802776 | tRNA-Val | 454 | |
| 136 | SAU802762 | tRNA-Tyr | 455 | |
| 136 | SAU802744 | tRNA-Gln | 456 | |
| 136 | SAU802727 | tRNA-Lys | 457 | |
| 137 | SAU802222 | SAV2222 | 458 | 741 |
| 137 | SAU802221 | SAV2221 | 459 | 742 |
| 137 | SAU802218 | rplM | 460 | 743 |
| 138 | SAU802251 | rpsJ | 461 | 744 |
| 138 | SAU802250 | rplC | 462 | 745 |
| 138 | SAU802249 | rplD | 463 | 746 |
| 138 | SAU802248 | rplW | 464 | 747 |
| 138 | SAU802247 | rplB | 465 | 748 |
| 138 | SAU802246 | rpsS | 466 | 749 |
| 138 | SAU802245 | rplV | 467 | 750 |
| 138 | SAU802244 | rpsC | 468 | 751 |
| 138 | SAU802243 | rplP | 469 | 752 |
| 138 | SAU802241 | rpsQ | 470 | 753 |
| 138 | SAU802240 | rplN | 471 | 754 |
| 138 | SAU802239 | rplX | 472 | 755 |
| 138 | SAU802238 | rplE | 473 | 756 |
| 138 | SAU802236 | rpsH | 474 | 757 |
| 138 | SAU802235 | rplF | 475 | 758 |
| 138 | SAU802234 | rplR | 476 | 759 |
| 138 | SAU802233 | rpsE | 477 | 760 |
| 138 | SAU802230 | secY | 478 | 761 |
| 138 | SAU802229 | adk | 479 | 762 |
| 138 | SAU802228 | infA | 480 | 763 |
| 138 | SAU802226 | rpsM | 481 | 764 |
| 138 | SAU802225 | rpsK | 482 | 765 |
| 138 | SAU802224 | rpoA | 483 | 766 |
| 138 | SAU802223 | rplQ | 484 | 767 |
| 139 | SAU800018 | vicR | 485 | 768 |
| 139 | SAU800019 | vicK | 486 | 769 |
| 140 | SAU802346 | fni | 487 | 770 |
| 141 | SAU802617 | nrdD | 488 | 771 |
| 141 | SAU802616 | SAV2616 | 489 | 772 |
| 142 | SAU800248 | SAV0248 | 490 | 773 |
| 143 | SAU800001 | dnaA | 491 | 774 |
| 143 | SAU800002 | dnaN | 492 | 775 |
| 144 | SAU800251 | SAV0251 | 493 | 776 |
| 144 | SAU800252 | SAV0252 | 494 | 777 |
| 145 | SAU800499 | gcaD | 495 | 778 |
| 145 | SAU800500 | prs | 496 | 779 |
| 146 | SAU801250 | SAV1250 | 497 | 780 |
| 147 | SAU801552 | pbp3 | 498 | 781 |
| 148 | SAU801552 | pbp3 | 498 | 781 |
| 149 | SAU801719 | rpsD | 499 | 782 |
| 150 | SAU800255 | SAV0255 | 500 | 783 |
| 150 | SAU800256 | SAV0256 | 501 | 784 |
| 150 | SAU800258 | SAV0258 | 502 | 785 |
| 151 | SAU802713 | rnpA | 503 | 786 |
| 152 | SAU800366 | ssb | 504 | 787 |
| 152 | SAU800367 | rpsR | 505 | 788 |
| 153 | SAU802545 | mvaA | 506 | 789 |
| 154 | SAU802689 | SAV2689 | 507 | 790 |
| 155 | SAU802439 | SAV2439 | 508 | 791 |
| 156 | SAU802084 | SAV2084 | 509 | 792 |
| 157 | SAU802125 | fbaA | 510 | 793 |
| 158 | SAU802128 | rpoE | 511 | 794 |
| 159 | SAU802154 | glmS | 512 | 795 |
| 160 | SAU802254 | topB | 513 | 796 |
| 161 | SAU802262 | fmhB | 514 | 797 |
| 162 | SAU802780 | rRNA-16S | 515 | |
| 162 | SAU802759 | rRNA-23S | 516 | |
| 162 | SAU802782 | rRNA-5S | 517 | |
| 163 | SAU801888 | map | 518 | 798 |
| 164 | SAU801729 | tyrS | 519 | 799 |
| 165 | SAU801790 | metK | 520 | 800 |
| 166 | SAU801717 | SAV1717 | 521 | 801 |
| 167 | SAU801727 | SAV1727 | 522 | 802 |
| 168 | SAU801504 | SAV1504 | 523 | 803 |
| 169 | SAU801505 | SAV1505 | 524 | 804 |
| 170 | SAU801565 | glyS | 525 | 805 |
| 171 | SAU801575 | rpsU | 526 | 806 |
| 172 | SAU801683 | thrS | 527 | 807 |
| 173 | SAU801336 | rpsN | 528 | 808 |
| 174 | SAU801454 | asnS | 529 | 809 |
| 175 | SAU801473 | hu | 530 | 810 |
| 176 | SAU801275 | SAV1275 | 531 | 811 |
| 177 | SAU801091 | pdf1 | 532 | 812 |
| 178 | SAU801113 | SAV1113 | 533 | 813 |
| 179 | SAU802736 | tRNA-Arg | 534 | |
| 180 | SAU800962 | pgi | 535 | 814 |
| 181 | SAU800996 | trpS | 536 | 815 |
| 182 | SAU800683 | bacA | 537 | 816 |
| 183 | SAU800704 | SAV0704 | 538 | 817 |
| 184 | SAU800742 | SAV0742 | 539 | 818 |
| 185 | SAU800753 | secA | 540 | 819 |
| 186 | SAU800754 | prfB | 541 | 820 |
| 187 | SAU802783 | tRNA-Arg | 542 | |
| 188 | SAU802730 | tRNA-Ser | 543 | |
| 189 | SAU802779 | rRNA-16S | 544 | |
| 189 | SAU802758 | rRNA-23S | 545 | |
| 189 | SAU802789 | rRNA-5S | 546 | |
| 190 | SAU800528 | gltX | 547 | 821 |
| 191 | SAU800009 | serS | 548 | 822 |
| 192 | SAU801192 | SAV1192 | 549 | 823 |
| 192 | SAU801193 | ileS | 550 | 824 |
| 193 | SAU801192 | SAV1192 | 549 | 823 |
| 194 | SAU801193 | ileS | 550 | 824 |

[0702] Each of the proliferation-required operons identified in Tables V and VI can be further studied using the methods described in Example 9 to identify any additional proliferation-required genes contained in each operon.

[0703] Analysis of an Exemplary Operon Comprising dnaA and dnaN in Staphylococcus Aureus

[0704] As previously indicated, one aspect of the present teachings is that a high confidence prediction of operons can be achieved even in instances where the overall operon structure and/or genes contained within the operon possess characteristics which increase the likelihood of misidentification when using conventional singular operon prediction methods. In an exemplary application of the aforementioned methods, in the target organism, Staphylococcus aureus, the genes dnaA and dnaN were predicted to reside in the same operon as indicated in Tables V and VI above (excerpts from each table shown below):

[0705] dnaA/dnaN operon entry from Table V

| SeqId | Strand | StartLocation | StopLocation | OperonMember |
|---|---|---|---|---|
| 143 | + | 517 | 3289 | dnaA, dnaN |

[0706] dnaA/dnaN operon entries from Table VI

| OperonSeqID | EEG_PathoSeqID | EEG_GeneName | EEG_DNASeqID | EEG_PrtSeqID |
|---|---|---|---|---|
| 143 | SAU800001 | dnaA | 491 | 774 |
| 143 | SAU800002 | dnaN | 492 | 775 |

[0707] Further information obtained during operon analysis indicated that dnaA has a sequence length of 1362 bp (mapped between a contig start of 517 and a contig end of 1878) and dnaN has a sequence length of 1134 bp (mapped between a contig start of 2156 and a contig end of 3289). The resulting intergenic distance between these two genes was found to be approximately 278 bp.

[0708] The distance between the dnaA/dnaN pair, is substantially greater than the distance between the majority of gene pairs for many known operons. For example, in Escherichia coli, the dnaA and dnaN genes reside only 5 bp apart and have previously been identified as being contained in the same operon. When genes are separated by large intergenic distances such as that described above, conventional approaches may fail to properly associate the genes with the same operon or may do so only with a low degree of confidence.

[0709] Using the methods described herein, it was predicted with high confidence that dnaA and dnaN genes reside in the same operon in Staphylococcus aureus despite the relatively large intergenic distance. Such a prediction was achieved in part by the observation that this gene pair is relatively highly conserved in a number of genomes to which Staphylococcus aureus may be compared. As an example, when comparing the dnaA/dnaN gene pair results in Staphylococcus aureus to those obtained for 39 distinct prokaryotic organism genomes comprising: Aquifex aeolicus, Bacillus halodurans, Bacillus subtilis, Borrelia burgdorferi, Buchnera sp., Campylobacter jejuni, Caulobacter crescentus, Chlamydia pneumoniae, Chlamydia trachomatis, Clostridium acetobutylicum, Enterococcus faecalis, Escherichia coli, Haemophilus influenzae, Helicobacter pylori, Lactococcus lactis, Listeria innocua, Listeria monocytogenes, Mycobacterium leprae, Mycobacterium tuberculosis, Mycoplasma genitalium, Mycoplasma pneumoniae, Mycoplasma pulmonis, Neisseria meningitides, Pasteurella multocida, Pseudomonas aeruginosa, Rickettsia conorii, Rickettsia prowazekii, Salmonella typhi, Salmonella typhimurium, Sinorhizobium meliloti, Streptococcus pneumoniae, Streptococcus pyogenes, Synechocystis sp., Thermotoga maritime, Treponema pallidum, Ureaplasma urealyticum, Vibrio cholerae, Xylella fastidiosa, and Yersinia pestis; it was observed that in approximately 24 of the comparison organisms the dnaA/dnaN gene pair was conserved. Furthermore, in certain organisms, for example Bacillus subtillis, dnaA and dnaN were found to be in the same operon despite an intergenic distance of approximately 189 bp.

[0710] Using conservation information such as that described above, it will be appreciated that high confidence operon prediction can be obtained even for gene pairs that might possess characteristics that would suggest that the genes of the gene pair reside in distinct operons when using conventional singular analysis approaches such as solely intergenic distance analysis.

[0711] The next Example illustrates how the operon prediction methods described herein can be used to identify proliferation-required operons from other bacterial species.

### Example 8

### Identification of Proliferation-Required Operons in Other Organisms

[0712] In this Example, the operon prediction methods described herein are used to predict the boundaries of proliferation-required operons from Acinetobacter baumannii, Anaplasma marginale, Bacillus anthracis, Bacteroides fragilis, Bordetella pertussis, Borrelia burgdorferi, Brucella abortus, Brucella melitensis, Burkholderia cepacia, Burkholderia fungorum, Burkholderia mallei, Campylobacter jejuni, Chlamydia pneumoniae, Chlamydia trachomatis, Clostridium acetobutylicum, Clostridium botulinum, Clostridium difficile, Clostridium perfringens, Corynebacterium diptheriae, Coxiella burnetii, Enterobacter cloacae, Enterococcus faecalis, Enterococcus faecium, Escherichia coli, Francisella tularensis, Haemophilus influenzae, Helicobacter pylori, Klebsiella pneumoniae, Legionella pneumophila, Listeria monocytogenes, Moraxella catarrhalis, Mycobacterium avium, Mycobacterium bovis, Mycobacterium leprae, Mycobacterium tuberculosis, Mycoplasma genitalium, Mycoplasma pneumoniae, Neisseria gonorrhoeae, Neisseria meningitidis, Nocardia asteroides, Pasteurella haemolytica, Pasteurella multocida, Proteus mirabilis, Proteus vulgaris, Pseudomonas aeruginosa, Pseudomonas putida, Pseudomonas syringae, Rickettsia rickettsii, Rochalimaea quintana, Salmonella bongori, Salmonella cholerasuis, Salmonella enterica, Salmonella paratyphi, Salmonella typhi, Salmonella typhimurium, Shigella boydii, Shigella dysenteriae, Shigella flexneri, Shigella sonnei, Staphylococcus aureus, Staphylococcus epidermidis, Staphylococcus haemolyticus, Streptococcus pneumoniae, Streptococcus mutans, Streptococcus pyogenes, Treponema pallidum, Ureaplasma urealyticum, Vibrio cholerae, Vibrio parahaemolyticus, Vibrio vulnificans, Yersinia enterocolitica, Yersinia pestis or any species falling within the genera of any of the above species.

[0713] Once the full length ORFs and the operons containing them have been identified using the methods described above, they can be obtained from a genomic library by performing a PCR amplification using primers at each end of the desired sequence. Those skilled in the art will appreciate that, if desired, the ORFs or operaons can be compared to homologous sequences in other cells or microorganisms to confirm the start and stop codons at the ends of the ORFs.

[0714] In some embodiments, the primers may contain restriction sites which facilitate the insertion of the gene or operon into a desired vector. For example, the gene may be inserted into an expression vector and used to produce the proliferation-required protein as described below. Other methods for obtaining the full length ORFs and/or operons are familiar to those skilled in the art. For example, natural restriction sites may be employed to insert the full length ORFs and/or operons into a desired vector.

[0715] The proliferation-required operons that are predicted are then further examined to identify any additional proliferation-required genes contained within the predicted operons by using the methods described in the following Example.

### Example 9

### Identification of Individual Genes within an Operon Required for Proliferation

[0716] This example illustrates a method for determining if a targeted gene within an operon is required for cellular proliferation by replacing the targeted allele in the chromosome with an in-frame deletion of the coding region of the targeted gene.

[0717] Deletion inactivation of a chromosomal copy of a gene in Acinetobacter baumannii, Anaplasma marginale, Bacillus anthracis, Bacteroides fragilis, Bordetella pertussis, Borrelia burgdorferi, Brucella abortus, Brucella melitensis, Burkholderia cepacia, Burkholderia fungorum, Burkholderia mallei, Campylobacter jejuni, Chlamydia pneumoniae, Chlamydia trachomatis, Clostridium acetobutylicum, Clostridium botulinum, Clostridium difficile, Clostridium perfringens, Corynebacterium diptheriae, Coxiella burnetii, Enterobacter cloacae, Enterococcus faecalis, Enterococcus faecium, Escherichia coli, Francisella tularensis, Haemophilus influenzae, Helicobacter pylori, Klebsiella pneumoniae, Legionella pneumophila, Listeria monocytogenes, Moraxella catarrhalis, Mycobacterium avium, Mycobacterium bovis, Mycobacterium leprae, Mycobacterium tuberculosis, Mycoplasma genitalium, Mycoplasma pneumoniae, Neisseria gonorrhoeae, Neisseria meningitidis, Nocardia asteroides, Pasteurella haemolytica, Pasteurella multocida, Proteus mirabilis, Proteus vulgaris, Pseudomonas aeruginosa, Pseudomonas putida, Pseudomonas syringae, Rickettsia rickettsii, Rochalimaea quintana, Salmonella bongori, Salmonella cholerasuis, Salmonella enterica, Salmonella paratyphi, Salmonella typhi, Salmonella typhimurium, Shigella boydii, Shigella dysenteriae, Shigella flexneri, Shigella sonnei, Staphylococcus aureus, Staphylococcus epidermidis, Staphylococcus haemolyticus, Streptococcus pneumoniae, Streptococcus mutans, Streptococcus pyogenes, Treponema pallidum, Ureaplasma urealyticum, Vibrio cholerae, Vibrio parahaemolyticus, Vibrio vulnificans, Yersinia enterocolitica, Yersinia pestis or any species falling within the genera of any of the above species can be accomplished by integrative gene replacement. The principles of this method are described in Xia, M., et al. 1999 Plasmid 42:144-149 and Hamilton, C. M., et al 1989. J. Bacteriol. 171: 4617-4622, the disclosures of which are incorporated herein by reference in their entireties. A similar gene disruption method is available for Pseudomonas aeruginosa, except the counter selectable marker is sacB (Schweizer, H. P., Klassen, T. and Hoang, T. (1996) Mol. Biol. of Pseudomonas. ASM press, 229-237, the disclosure of which is incorporated herein by reference in its entirety). In this approach, a mutant allele of the targeted gene is constructed by way of an in-frame deletion and introduced into the chromosome using a suicide vector. This results in a tandem duplication comprising a deleted (null) allele and a wild type allele of the target gene. Cells in which the vector sequences have been deleted are isolated using a counter-selection technique. Removal of the vector sequence from the chromosomal insertion results in either restoration of the wild-type target sequence or replacement of the wild type sequence with the deletion (null) allele. E. faecalis genes can be disrupted using a suicide vector that contains an internal fragment to a gene of interest. With the appropriate selection this plasmid will homologously recombine into the chromosome (Nallapareddy, S. R., X. Qin, G. M. Weinstock, M. Hook, B. E. Murray. 2000. Infect. Immun. 68:5218-5224, the disclosure of which is incorporated herein by reference).

[0718] The resultant population of colonies of Acinetobacter baumannii, Anaplasma marginale, Bacillus anthracis, Bacteroides fragilis, Bordetella pertussis, Borrelia burgdorferi, Brucella abortus, Brucella melitensis, Burkholderia cepacia, Burkholderia fungorum, Burkholderia mallei, Campylobacter jejuni, Chlamydia pneumoniae, Chlamydia trachomatis, Clostridium acetobutylicum, Clostridium botulinum, Clostridium difficile, Clostridium perfringens, Corynebacterium diptheriae, Coxiella burnetii, Enterobacter cloacae, Enterococcus faecalis, Enterococcus faecium, Escherichia coli, Francisella tularensis, Haemophilus influenzae, Helicobacter pylori, Klebsiella pneumoniae, Legionella pneumophila, Listeria monocytogenes, Moraxella catarrhalis, Mycobacterium avium, Mycobacterium bovis, Mycobacterium leprae, Mycobacterium tuberculosis, Mycoplasma genitalium, Mycoplasma pneumoniae, Neisseria gonorrhoeae, Neisseria meningitidis, Nocardia asteroides, Pasteurella haemolytica, Pasteurella multocida, Proteus mirabilis, Proteus vulgaris, Pseudomonas aeruginosa, Pseudomonas putida, Pseudomonas syringae, Rickettsia rickettsii, Rochalimaea quintana, Salmonella bongori, Salmonella cholerasuis, Salmonella enterica, Salmonella paratyphi, Salmonella typhi, Salmonella typhimurium, Shigella boydii, Shigella dysenteriae, Shigella flexneri, Shigella sonnet, Staphylococcus aureus, Staphylococcus epidermidis, Staphylococcus haemolyticus, Streptococcus pneumoniae, Streptococcus mutans, Streptococcus pyogenes, Treponema pallidum, Ureaplasma urealyticum, Vibrio cholerae, Vibrio parahaemolyticus, Vibrio vulnificans, Yersinia enterocolitica, Yersinia pestis or any species falling within the genera of any of the above species can then be evaluated to determine whether the target sequence is required for proliferation by PCR amplification of the affected target sequence. If the targeted gene is not required for proliferation, then PCR analysis will show that roughly equal numbers of colonies have retained either the wild-type or the mutant allele. If the targeted gene is required for proliferation, then only wild-type alleles will be recovered in the PCR analysis.

[0719] The method of cross-over PCR is used to generate the mutant allele by amplification of nucleotide sequences flanking but not including the coding region of the gene of interest, using specifically designed primers such that overlap between the resulting two PCR amplification products allows them to hybridize. Further PCR amplification of this hybridization product using primers representing the extreme 5′ and 3′ ends can produce an amplification product containing an in-frame deletion of the coding region but retaining substantial flanking sequences.

[0720] For Staphylococcus aureus, this amplification product is subcloned into the suicide vector pSA3182 (Xia, M., et al. 1999 Plasmid 42:144-149, the disclosure of which is incorporated herein by reference in its entirety) which is host-dependent for autonomous replication. This vector includes a tetC tetracycline-resistance marker and the origin of replication of the well-known Staphylococcus aureus plasmid pT181 (Mojumdar, M and Kahn, S. A., Characterization of the Tetracycline Resistance Gene of Plasmid pT181, J. Bacteriol. 170: 5522 (1988), the disclosure of which is incorporated herein by reference in its entirety). The vector lacks the repC gene which is required for autonomous replication of the vector at the pT181 origin. This vector can be propagated in a Staphylococcus aureus host strain such as SA3528, which expresses repC in trans. Once the amplified truncated target gene sequence is cloned and propagated in the pSA3182 vector, it can then be introduced into a repC minus strain such as RN4220 (Kreiswirth, B. N. et al., The Toxic Shock Syndrome Exotoxin Structural Gene is Not Detectably Transmitted by a Prophage, Nature 305:709-712 (1983), the disclosure of which is incorporated herein by reference in its entirety) by electroporation with selection for tetracycline resistance. In this strain, the vector must integrate by homologous recombination at the targeted gene in the chromosome to impart drug resistance. This results in a inserted truncated copy of the allele, followed by pSA3182 vector sequence, and finally an intact and functional allele of the targeted gene.

[0721] Once a tetracycline resistant Staphylococcus aureus strain is isolated using the above technique and shown to include truncated and wild-type alleles of the targeted gene as described above, a second plasmid, pSA7592 (Xia, M., et al. 1999 Plasmid 42:144-149, the disclosure of which is incorporated herein by reference in its entirety) is introduced into the strain by electroporation. This gene includes an erythromycin resistance gene and a repC gene that is expressed at high levels. Expression of repC in these transformants is toxic due to interference of normal chromosomal replication at the integrated pT181 origin of replication. This selects for strains that have removed the vector sequence by homologous recombination, resulting in either of two outcomes: The selected cells either possess a wild-type allele of the targeted gene or a gene in which the wild-type allele has been replaced by the engineered in-frame deletion of the truncated allele.

[0722] PCR amplification can be used to determine the genetic outcome of the above process in the resulting erythromycin resistant, tet sensitive transformant colonies. If the targeted gene is not required for cellular replication, then PCR evidence for both wild-type and mutant alleles will be found among the population of resultant transformants. However, if the targeted gene is required for cellular proliferation, then only the wild-type form of the gene will be evident among the resulting transformants.

[0723] Similarly, for Acinetobacter baumannii, Anaplasma marginale, Bacillus anthracis, Bacteroides fragilis, Bordetella pertussis, Borrelia burgdorferi, Brucella abortus, Brucella melitensis, Burkholderia cepacia, Burkholderia fungorum, Burkholderia mallet, Campylobacter jejuni, Chlamydia pneumoniae, Chlamydia trachomatis, Clostridium acetobutylicum, Clostridium botulinum, Clostridium difficile, Clostridium perfringens, Corynebacterium diptheriae, Coxiella burnetii, Enterobacter cloacae, Enterococcus faecalis, Enterococcus faecium, Escherichia coli, Francisella tularensis, Haemophilus influenzae, Helicobacter pylori, Klebsiella pneumoniae, Legionella pneumophila, Listeria monocytogenes, Moraxella catarrhalis, Mycobacterium avium, Mycobacterium bovis, Mycobacterium leprae, Mycobacterium tuberculosis, Mycoplasma genitalium, Mycoplasma pneumoniae, Neisseria gonorrhoeae, Neisseria meningitidis, Nocardia asteroides, Pasteurella haemolytica, Pasteurella multocida, Proteus mirabilis, Proteus vulgaris, Pseudomonas aeruginosa, Pseudomonas putida, Pseudomonas syringae, Rickettsia rickettsii, Rochalimaea quintana, Salmonella bongori, Salmonella cholerasuis, Salmonella enterica, Salmonella paratyphi, Salmonella typhi, Salmonella typhimurium, Shigella boydii, Shigella dysenteriae, Shigella flexneri, Shigella sonnet, Staphylococcus aureus, Staphylococcus epidermidis, Staphylococcus haemolyticus, Streptococcus pneumoniae, Streptococcus mutans, Streptococcus pyogenes, Treponema pallidum, Ureaplasma urealyticum, Vibrio cholerae, Vibrio parahaemolyticus, Vibrio vulnificans, Yersinia enterocolitica, Yersinia pestis or any species falling within the genera of any of the above species the PCR products containing the mutant allele of the target sequence may be introduced into an appropriate knockout vector and cells in which the wild type target has been disrupted are selected using the appropriate methodology.

[0724] The above methods have the advantage that insertion of an in-frame deletion mutation is far less likely to cause downstream polar effects on genes in the same operon as the targeted gene. However, it will be appreciated that other methods for disrupting Acinetobacter baumannii, Anaplasma marginale, Bacillus anthracis, Bacteroides fragilis, Bordetella pertussis, Borrelia burgdorferi, Brucella abortus, Brucella melitensis, Burkholderia cepacia, Burkholderia fungorum, Burkholderia mallei, Campylobacter jejuni, Chlamydia pneumoniae, Chlamydia trachomatis, Clostridium acetobutylicum, Clostridium botulinum, Clostridium difficile, Clostridium perfringens, Corynebacterium diptheriae, Coxiella burnetii, Enterobacter cloacae, Enterococcus faecalis, Enterococcus faecium, Escherichia coli, Francisella tularensis, Haemophilus influenzae, Helicobacter pylori, Klebsiella pneumoniae, Legionella pneumophila, Listeria monocytogenes, Moraxella catarrhalis, Mycobacterium avium, Mycobacterium bovis, Mycobacterium leprae, Mycobacterium tuberculosis, Mycoplasma genitalium, Mycoplasma pneumoniae, Neisseria gonorrhoeae, Neisseria meningitidis, Nocardia asteroides, Pasteurella haemolytica, Pasteurella multocida, Proteus mirabilis, Proteus vulgaris, Pseudomonas aeruginosa, Pseudomonas putida, Pseudomonas syringae, Rickettsia rickettsii, Rochalimaea quintana, Salmonella bongori, Salmonella cholerasuis, Salmonella enterica, Salmonella paratyphi, Salmonella typhi, Salmonella typhimurium, Shigella boydii, Shigella dysenteriae, Shigella flexneri, Shigella sonnei, Staphylococcus aureus, Staphylococcus epidermidis, Staphylococcus haemolyticus, Streptococcus pneumoniae, Streptococcus mutans, Streptococcus pyogenes, Treponema pallidum, Ureaplasma urealyticum, Vibrio cholerae, Vibrio parahaemolyticus, Vibrio vulnificans, Yersinia enterocolitica, Yersinia pestis or any species falling within the genera of any of the above species genes which are familiar to those skilled in the art may also be used.

[0725] Each gene in the operon can be disrupted using the methodology above to determine whether it is required for proliferation.

[0726] The following example describes methods for inhibiting cellular proliferation of Staphylococcus aureus by expressing an antisense nucleic acid that is complementary to a portion of an operon that contains a proliferation-required gene.

### Example 10

### Inhibition of Proliferation by Providing an Antisense Nucleic Acid Complementary to a Portion of a Proliferation-Require Operon in Staphylococcus aureus

[0727] Several proliferation-inhibiting antisense nucleic acids which are complementary to portions of the Staphylococcus aureus cap operon (SEQ ID NO: 106), but which are not complementary to any of the currently known proliferation-required genes that are contained within this operon, are identified using the methods described in Example 1. An antisense nucleic acid that is complementary to a 30 nucleotide portion of the cap operon (SEQ ID NO: 106) located just upstream of the capA gene is selected. Additionally, an antisense nucleic acid that is complementary to a 30 nucleotide portion of the 5′-end of the capA gene is selected. Each of the two selected 30 nucleotide antisense nucleic acids are separately subcloned into the vector pXyIT5-P15a, which harbors the xylose inducible XylT5 promoter, in an orientation such that the strand that is complementary to the sense strand of the cap operon is transcribed. The ligated products are then separately transformed into electrocompetent Staphylococcus aureus. Resulting transformants are plated on agar containing LB+0.2% glucose (LBG medium)+chloramphenicol at 15 μg/ml (LBG+CM15 medium). After an overnight incubation, colonies are picked and inoculated into flasks containing fresh LBG+CM15 liquid medium. Each of the inoculated cultures containing an antisense construct are grown for 16 hours at 37° C. then 100 μl is transferred to fresh 5 ml LBG+CM15 liquid cultures with or without 2% xylose. The optical density of each newly inoculated liquid culture is measured and the cultures are then incubated for 16 hours at 37° C. At the end of the incubation, the optical density of each culture is again measured to determine the effect of inducing the expression of each of the antisense nucleic acids on cellular proliferation.

[0728] There is no change in the optical density of the cultures of Staphylococcus aureus grown in the presence of 2% xylose at the end of the 16 hour incubation whereas the optical density of the cultures grown in the absence of xylose changes by more than two absorbance units. These results are observed for both cultures transformed with the pXylT5-P15a vector harboring the 30 nucleotide antisense fragment complementary to the 5′-noncoding region upstream of the capA gene and cultures transformed with the pXylT5-P15a vector harboring the 30 nucleotide antisense fragment complementary to the 5′-coding region of the capA gene. Accordingly, these results indicate that induction of expression of an antisense transcript complementary to a noncoding portion of the cap operon or an antisense transcript complementary to a coding region of a gene that is contained in the cap operon, but which is not required for proliferation, causes an inhibition of the activity or reduction in the amount of one or more proliferation-required gene products encoded by one or more proliferation-required genes that are contained within the cap operon.

[0729] It will be appreciated that antisense nucleic acids of lengths other than 30 nucleotides and antisense nucleic acids which are complementary to other portions of the cap operon can also be used to inhibit proliferation. Furthermore, it will be appreciated that antisense nucleic acids complementary to portions of other proliferation-required operons from Staphylococcus aureus, including portions of the operons of SEQ ID NOs: 1-194, can be used to inhibit cellular proliferation.

### Example 11

### Inhibition of Proliferation in Other Bacterial Species

[0730] The ability of an antisense molecule identified in a first organism to inhibit the proliferation of a second organism was validated using antisense nucleic acids which inhibit the growth of E. coli which were identified using methods similar to those described above. Expression vectors which inhibited growth of E. coli upon induction of antisense RNA expression with IPTG were transformed directly into Enterobacter cloacae, Klebsiella pneumonia or Salmonella typhimurium. The transformed cells were then assayed for growth inhibition according to the method of Example 1. After growth in liquid culture, cells were plated at various serial dilutions and a score determined by calculating the log difference in growth for INDUCED vs. UNINDUCED antisense RNA expression as determined by the maximum 10 fold dilution at which a colony was observed. The results of these experiments are listed below in Table VII. If there was no effect of antisense RNA expression in a microorganism, the clone is minus in Table VII. In contrast, a positive in Table VII means that at least 10-fold more cells were required to observe a colony on the induced plate than on the non-induced plate under the conditions used and in that microorganism.

TABLE VII
Sensitivity of Other Microorganisms to Antisense Nucleic
Acids That Inhibit Proliferation in E. coli

| Mol. No. | S. typhimurium | E. cloacae | K. pneumoniae |
|---|---|---|---|
| EcXA001 | + | + | − |
| EcXA004 | + | − | − |
| EcXA005 | + | + | + |
| EcXA006 | − | − | − |
| EcXA007 | − | + | − |
| EcXA008 | + | − | + |
| EcXA009 | − | − | − |
| EcXA010 | + | + | + |
| EcXA011 | − | + | − |
| EcXA012 | − | + | − |
| EcXA013 | + | + | + |
| EcXA014 | + | + | − |
| EcXA015 | + | + | + |
| EcXA016 | + | + | + |
| EcXA017 | + | + | + |
| EcXA018 | + | + | + |
| EcXA019 | + | + | + |
| EcXA020 | + | + | + |
| EcXA021 | + | + | + |
| EcXA023 | + | + | + |
| EcXA024 | + | − | + |
| EcXA025 | − | − | − |
| EcXA026 | + | + | − |
| EcXA027 | + | + | − |
| EcXA028 | + | − | − |
| EcXA029 | − | − | − |
| EcXA030 | + | + | + |
| EcXA031 | + | − | − |
| EcXA032 | + | + | − |
| EcXA033 | + | + | + |
| EcXA034 | + | + | + |
| EcXA035 | − | − | − |
| EcXA036 | + | − | + |
| EcXA037 | + | + | − |
| EcXA038 | + | + | + |
| EcXA039 | + | − | − |
| EcXA041 | + | + | + |
| EcXA042 | − | + | + |
| EcXA043 | − | − | − |
| EcXA044 | − | − | − |
| EcXA045 | + | + | + |
| EcXA046 | − | − | − |
| EcXA047 | + | + | − |
| EcXA048 | − | − | − |
| EcXA049 | + | − | − |
| EcXA050 | − | − | − |
| EcXA051 | + | − | − |
| EcXA052 | + | − | − |
| EcXA053 | + | + | + |
| EcXA054 | − | − | + |
| EcXA055 | + | − | − |
| EcXA056 | + | − | + |
| EcXA057 | + | + | − |
| EcXA058 | − | − | − |
| EcXA059 | + | + | + |
| EcXA060 | − | − | − |
| EcXA061 | − | − | − |
| EcXA062 | − | − | − |
| EcXA063 | + | + | − |
| EcXA064 | − | − | − |
| EcXA065 | + | + | − |
| EcXA066 | − | − | − |
| EcXA067 | − | + | − |
| EcXA068 | − | − | − |
| EcXA069 | − | + | − |
| EcXA070 | − | − | − |
| EcXA071 | + | − | − |
| EcXA072 | + | − | + |
| EcXA073 | + | + | + |
| EcXA074 | + | + | + |
| EcXA075 | + | − | − |
| EcXA076 | − | + | − |
| EcXA077 | + | + | − |
| EcXA079 | + | + | + |
| EcXA080 | + | − | − |
| EcXA082 | − | + | − |
| EcXA083 | − | − | − |
| EcXA084 | − | + | − |
| EcXA086 | − | − | − |
| EcXA087 | − | − | − |
| EcXA088 | − | − | − |
| EcXA089 | − | − | − |
| EcXA090 | − | − | − |
| EcXA091 | − | − | − |
| EcXA092 | − | − | − |
| EcXA093 | − | − | − |
| EcXA094 | + | + | + |
| EcXA095 | + | + | − |
| EcXA096 | − | − | − |
| EcXA097 | + | − | − |
| EcXA098 | + | − | − |
| EcXA099 | − | − | − |
| EcXA100 | − | − | − |
| EcXA101 | − | − | − |
| EcXA102 | − | − | − |
| EcXA103 | − | + | − |
| EcXA104 | + | + | + |
| EcXA106 | + | + | − |
| EcXA107 | − | − | − |
| EcXA108 | − | − | − |
| EcXA109 | − | − | − |
| EcXA110 | + | + | − |
| EcXA111 | − | − | − |
| EcXA112 | − | + | − |
| EcXA113 | + | + | + |
| EcXA114 | − | + | − |
| EcXA115 | − | + | − |
| EcXA116 | + | + | − |
| EcXA117 | + | − | − |
| EcXA118 | − | − | − |
| EcXA119 | + | + | − |
| EcXA120 | − | − | − |
| EcXA121 | − | − | − |
| EcXA122 | + | − | + |
| EcXA123 | + | − | − |
| EcXA124 | − | − | − |
| EcXA125 | − | − | − |
| EcXA126 | − | − | − |
| EcXA127 | + | + | − |
| EcXA128 | − | − | − |
| EcXA129 | − | + | − |
| EcXA130 | + | + | − |
| EcXA132 | − | − | − |
| EcXA133 | − | − | − |
| EcXA136 | − | − | − |
| EcXA137 | − | − | − |
| EcXA138 | + | − | − |
| EcXA139 | − | − | − |
| EcXA140 | + | − | − |
| EcXA141 | + | − | − |
| EcXA142 | − | − | − |
| EcXA143 | − | + | − |
| EcXA144 | + | + | − |
| EcXA145 | − | − | − |
| EcXA146 | − | − | − |
| EcXA147 | − | − | − |
| EcXA148 | − | − | − |
| EcXA149 | + | + | + |
| EcXA150 | − | − | − |
| EcXA151 | + | − | − |
| EcXA152 | − | − | − |
| EcXA153 | + | + | − |
| EcXA154 | − | − | − |
| EcXA155 | − | − | ND |
| EcXA156 | − | + | − |
| EcXA157 | − | − | − |
| EcXA158 | − | − | − |
| EcXA159 | + | − | − |
| EcXA160 | + | − | − |
| EcXA162 | − | − | − |
| EcXA163 | − | − | − |
| EcXA164 | − | − | − |
| EcXA165 | − | − | − |
| EcXA166 | − | − | − |
| EcXA167 | − | − | − |
| EcXA168 | − | − | − |
| EcXA169 | − | + | − |
| EcXA171 | − | − | − |
| EcXA172 | − | − | − |
| EcXA173 | − | − | − |
| EcXA174 | − | − | − |
| EcXA175 | − | − | − |
| EcXA176 | − | − | − |
| EcXA178 | − | − | − |
| EcXA179 | − | − | − |
| EcXA180 | + | − | − |
| EcXA181 | − | − | − |
| EcXA182 | − | − | − |
| EcXA183 | − | − | − |
| EcXA184 | − | − | − |
| EcXA185 | − | − | − |
| EcXA186 | − | − | − |
| EcXA187 | + | + | + |
| EcXA189 | + | − | − |
| EcXA190 | + | + | + |
| EcXA191 | + | + | − |
| EcXA192 | − | + | − |

[0731] Given the above results, a skilled artisan will appreciate that the ability of an antisense nucleic acid which inhibits the proliferation of Staphylococcus aureus, including antisense nucleic acids complementary to at least a portion of an operon comprising a nucleotide sequence selected from the group consisting of SEQ ID NOs: 1-194, can be evaluated for the ability to inhibit the proliferation of Acinetobacter baumannii, Anaplasma marginale, Bacillus anthracis, Bacteroides fragilis, Bordetella pertussis, Borrelia burgdorferi, Brucella abortus, Brucella melitensis, Burkholderia cepacia, Burkholderia fungorum, Burkholderia mallei, Campylobacter jejuni, Chlamydia pneumoniae, Chlamydia trachomatis, Clostridium acetobutylicum, Clostridium botulinum, Clostridium difficile, Clostridium perfringens, Corynebacterium diptheriae, Coxiella burnetii, Enterobacter cloacae, Enterococcus faecalis, Enterococcus faecium, Escherichia coli, Francisella tularensis, Haemophilus influenzae, Helicobacter pylori, Klebsiella pneumoniae, Legionella pneumophila, Listeria monocytogenes, Moraxella catarrhalis, Mycobacterium avium, Mycobacterium bovis, Mycobacterium leprae, Mycobacterium tuberculosis, Mycoplasma genitalium, Mycoplasma pneumoniae, Neisseria gonorrhoeae, Neisseria meningitidis, Nocardia asteroides, Pasteurella haemolytica, Pasteurella multocida, Proteus mirabilis, Proteus vulgaris, Pseudomonas aeruginosa, Pseudomonas putida, Pseudomonas syringae, Rickettsia rickettsii, Rochalimaea quintana, Salmonella bongori, Salmonella cholerasuis, Salmonella enterica, Salmonella paratyphi, Salmonella typhi, Salmonella typhimurium, Shigella boydii, Shigella dysenteriae, Shigella flexneri, Shigella sonnei, Staphylococcus aureus, Staphylococcus epidermidis, Staphylococcus haemolyticus, Streptococcus pneumoniae, Streptococcus mutans, Streptococcus pyogenes, Treponema pallidum, Ureaplasma urealyticum, Vibrio cholerae, Vibrio parahaemolyticus, Vibrio vulnificans, Yersinia enterocolitica, Yersinia pestis or any species falling within the genera of any of the above species.

[0732] It will also be appreciated that the above methods for evaluating the ability of an antisense nucleic acid to inhibit the proliferation of a heterologous organism can be performed using antisense nucleic acids complementary to at least a portion of any of the proliferation-required operons identified using the operon prediction methods described herein. For example, an antisense nucleic acid complementary to at least a portion of a proliferation-required operon from Acinetobacter baumannii, Anaplasma marginale, Bacillus anthracis, Bacteroides fragilis, Bordetella pertussis, Borrelia burgdorferi, Brucella abortus, Brucella melitensis, Burkholderia cepacia, Burkholderia fungorum, Burkholderia mallei, Campylobacter jejuni, Chlamydia pneumoniae, Chlamydia trachomatis, Clostridium acetobutylicum, Clostridium botulinum, Clostridium difficile, Clostridium perfringens, Corynebacterium diptheriae, Coxiella burnetii, Enterobacter cloacae, Enterococcus faecalis, Enterococcus faecium, Escherichia coli, Francisella tularensis, Haemophilus influenzae, Helicobacter pylori, Klebsiella pneumoniae, Legionella pneumophila, Listeria monocytogenes, Moraxella catarrhalis, Mycobacterium avium, Mycobacterium bovis, Mycobacterium leprae, Mycobacterium tuberculosis, Mycoplasma genitalium, Mycoplasma pneumoniae, Neisseria gonorrhoeae, Neisseria meningitidis, Nocardia asteroides, Pasteurella haemolytica, Pasteurella multocida, Proteus mirabilis, Proteus vulgaris, Pseudomonas aeruginosa, Pseudomonas putida, Pseudomonas syringae, Rickettsia rickettsii, Rochalimaea quintana, Salmonella bongori, Salmonella cholerasuis, Salmonella enterica, Salmonella paratyphi, Salmonella typhi, Salmonella typhimurium, Shigella boydii, Shigella dysenteriae, Shigella flexneri, Shigella sonnei, Staphylococcus aureus, Staphylococcus epidermidis, Staphylococcus haemolyticus, Streptococcus pneumoniae, Streptococcus mutans, Streptococcus pyogenes, Treponema pallidum, Ureaplasma urealyticum, Vibrio cholerae, Vibrio parahaemolyticus, Vibrio vulnificans, Yersinia enterocolitica, Yersinia pestis or any species falling within the genera of any of the above species can be evaluated for its ability to inhibit the proliferation of Acinetobacter baumannii, Anaplasma marginale, Bacillus anthracis, Bacteroides fragilis, Bordetella pertussis, Borrelia burgdorferi, Brucella abortus, Brucella melitensis, Burkholderia cepacia, Burkholderia fungorum, Burkholderia mallei, Campylobacter jejuni, Chlamydia pneumoniae, Chlamydia trachomatis, Clostridium acetobutylicum, Clostridium botulinum, Clostridium difficile, Clostridium perfringens, Corynebacterium diptheriae, Coxiella burnetii, Enterobacter cloacae, Enterococcus faecalis, Enterococcus faecium, Escherichia coli, Francisella tularensis, Haemophilus influenzae, Helicobacter pylori, Klebsiella pneumoniae, Legionella pneumophila, Listeria monocytogenes, Moraxella catarrhalis, Mycobacterium avium, Mycobacterium bovis, Mycobacterium leprae, Mycobacterium tuberculosis, Mycoplasma genitalium, Mycoplasma pneumoniae, Neisseria gonorrhoeae, Neisseria meningitidis, Nocardia asteroides, Pasteurella haemolytica, Pasteurella multocida, Proteus mirabilis, Proteus vulgaris, Pseudomonas aeruginosa, Pseudomonas putida, Pseudomonas syringae, Rickettsia rickettsii, Rochalimaea quintana, Salmonella bongori, Salmonella cholerasuis, Salmonella enterica, Salmonella paratyphi, Salmonella typhi, Salmonella typhimurium, Shigella boydii, Shigella dysenteriae, Shigella flexneri, Shigella sonnei, Staphylococcus aureus, Staphylococcus epidermidis, Staphylococcus haemolyticus, Streptococcus pneumoniae, Streptococcus mutans, Streptococcus pyogenes, Treponema pallidum, Ureaplasma urealyticum, Vibrio cholerae, Vibrio parahaemolyticus, Vibrio vulnificans, Yersinia enterocolitica, Yersinia pestis or any species falling within the genera of any of the above species.

[0733] Those skilled in the art will appreciate that an antisense molecule which works in the microorganism from which it was obtained will not always work in a heterologous cell or microorganism. A skilled artisan will also appreciate that a negative result in a heterologous cell or microorganism does not necessarily mean that that cell or microorganism is missing a homologous proliferation-required operon nor does it necessarily mean that the homologous operon is not required for proliferation. However, a positive result means that the heterologous cell or microorganism contains a proliferation-required operon which is homologous, at least in part, to the proliferation-required operon against which the antisense nucleic acid was originally identified.

[0734] A skilled artisan will also recognize that heterologous cells in which proliferation is inhibited by antisense nucleic acids may be used in cell-based assays as described herein for the identification and characterization of compounds in order to develop antibiotics effective in such cells or microorganisms.

[0735] The following Example demonstrates methods for the inhibition of cellular proliferation in a first organism by using an antisense nucleic acid that is complementary to at least a portion of an operon that contains a gene that is homologous to a gene in the operon of a second organism.

### Example 12

### Inhibition of the Proliferation in Organisms Possessing a Proliferation-Required Gene that is Homologous to a Proliferation-Required Gene Contained in a Staphylococcus aureus Proliferation-Required Operon

[0736] In this example, an organism identified as possessing a proliferation-required gene that is homologous to a gene required for proliferation in Staphylococcus aureus (SEQ ID NOs: 201-550) or possessing a proliferation-required polypeptide that is homologous to a polypeptide required for proliferation in Staphylococcus aureus (SEQ ID NOs: 551-824) is provided with an antisense nucleic acid that is complementary to at least a portion of a proliferation-required operon which contains the homologous proliferation-required gene.

[0737] A nucleic acid that is homologous to a Staphylococcus aureus proliferation-required gene of SEQ ID NO: 491 is identified in Enterococcus faecalis using the method described in Example 6. Alternatively, a polypeptide that is homologous to a Staphylococcus aureus proliferation-required polypeptide encoded by SEQ ID NO: 491 (the polypeptide of SEQ ID NO: 774) is identified in Enterococcus faecalis using the methods decribed herein. Using genomic sequence information and the method described in Example 7, the operon boundaries for the operon containing the gene homologous to the gene SEQ ID NO: 491 are predicted.

[0738] Using the above identified operon sequence as a template, a pool of antisense nucleic acids, which is complementary to the 5′-end of the operon and ranges in size from 20 to 100 nucleotides, is generated using DNA synthesis and PCR technologies that are well known in the art. The antisense nucleic acid pool is then cloned into the expression vector pEPEF3 in an orientation such that transcripts complementary to the 5′-portion of the proliferation-required operon identified from Enterococcus faecalis is produced.

[0739] After transformation of the antisense expression vector into Enterococcus faecalis, the cells are grown and induction of expression of the antisense transcript is induced by adding xylose as described in Example 10.

[0740] Expression of the antisense transcripts results in inhibition of the proliferation of Enterococcus faecalis.

### Example 13

### Screening Chemical Libraries

[0741] Having determined the identity of proliferation-required operons, the present invention further contemplates the use of these operons in assays to screen libraries of compounds for potential drug candidates. The generation of chemical libraries is well known in the art. For example, combinatorial chemistry can be used to generate a library of compounds to be screened in the assays described herein. A combinatorial chemical library is a collection of diverse chemical compounds generated by either chemical synthesis or biological synthesis by combining a number of chemical “building block” reagents. For example, a linear combinatorial chemical library such as a polypeptide library is formed by combining amino acids in every possible combination to yield peptides of a given length. Millions of chemical compounds theoretically can be synthesized through such combinatorial mixings of chemical building blocks. For example, one commentator observed that the systematic, combinatorial mixing of 100 interchangeable chemical building blocks results in the theoretical synthesis of 100 million tetrameric compounds or 10 billion pentameric compounds. (Gallop et al., “Applications of Combinatorial Technologies to Drug Discovery, Background and Peptide Combinatorial Libraries,” Journal of Medicinal Chemistry, Vol. 37, No. 9, 1233-1250 (1994). Other chemical libraries known to those in the art may also be used, including natural product libraries. Once generated, combinatorial libraries can be screened for compounds that possess the ability to inhibit cellular proliferation.

[0742] Current cell-based assays used to identify or to characterize compounds for drug discovery and development frequently depend on detecting the ability of a test compound to modulate the activity of a target molecule located within a cell or located on the surface of a cell. An advantage of cell-based assays is that they allow the effect of a compound on a target molecule's activity to be detected within the physiologically relevant environment of the cell as opposed to an in vitro environment. Most often such target molecules are proteins such as enzymes, receptors and the like. However, target molecules may also include other molecules such as DNAs, lipids, carbohydrates and RNAs including messenger RNAs, ribosomal RNAs, tRNAs, regulatory RNAs and the like. A number of highly sensitive cell-based assay methods are available to those of skill in the art to detect binding and interaction of test compounds with specific target molecules. However, these methods are generally not highly effective when the test compound binds to or otherwise interacts with its target molecule with moderate or low affinity. In addition, the target molecule may not be readily accessible to a test compound in solution, such as when the target molecule is located inside the cell or within a cellular compartment. Thus, current cell-based assay methods are limited in that they are not effective in identifying or characterizing compounds that interact with their targets with moderate to low affinity or compounds that interact with targets that are not readily accessible.

[0743] The cell-based assay methods of the present invention have substantial advantages over current cell-based assays. These advantages derive from the use of sensitized cells in which the level or activity of at least one proliferation-required product encoded by a gene contained within a proliferation-required operon has been specifically reduced to the point where the presence or absence of its function becomes a rate-determining step for cellular proliferation. The cells in which the level or activity of at least one proliferation-required gene product has been reduced become much more sensitive to compounds that are active against the affected target molecule (the proliferation-required gene product). Thus, cell-based assays of the present invention are capable of detecting compounds exhibiting low or moderate potency against the target molecule of interest because such compounds are substantially more potent on sensitized cells than on non-sensitized cells. The effect may be such that a test compound may be two to several times more potent, at least 10 times more potent, at least 20 times more potent, at least 50 times more potent, at least 100 times more potent, at least 1000 times more potent, or even more than 1000 times more potent when tested on the sensitized cells as compared to the non-sensitized cells. Antisense nucleic acids complementary to at least a portion of a proliferation-required operon comprising a nucleotide sequence selected from the group consisting of SEQ ID NOs: 1-194 can be used to inhibit the proliferation of Staphylococcus aureus thereby sensitizing the cells for use in any of the cell-based assays described herein. Additionally, antisense nucleic acids complementary to proliferation-required operons, or portions thereof, from Acinetobacter baumannii, Anaplasma marginale, Bacillus anthracis, Bacteroides fragilis, Bordetella pertussis, Borrelia burgdorferi, Brucella abortus, Brucella melitensis, Burkholderia cepacia, Burkholderia fungorum, Burkholderia mallei, Campylobacter jejuni, Chlamydia pneumoniae, Chlamydia trachomatis, Clostridium acetobutylicum, Clostridium botulinum, Clostridium difficile, Clostridium perfringens, Corynebacterium diptheriae, Coxiella burnetii, Enterobacter cloacae, Enterococcus faecalis, Enterococcus faecium, Escherichia coli, Francisella tularensis, Haemophilus influenzae, Helicobacter pylori, Klebsiella pneumoniae, Legionella pneumophila, Listeria monocytogenes, Moraxella catarrhalis, Mycobacterium avium, Mycobacterium bovis, Mycobacterium leprae, Mycobacterium tuberculosis, Mycoplasma genitalium, Mycoplasma pneumoniae, Neisseria gonorrhoeae, Neisseria meningitidis, Nocardia asteroides, Pasteurella haemolytica, Pasteurella multocida, Proteus mirabilis, Proteus vulgaris, Pseudomonas aeruginosa, Pseudomonas putida, Pseudomonas syringae, Rickettsia rickettsii, Rochalimaea quintana, Salmonella bongori, Salmonella cholerasuis, Salmonella enterica, Salmonella paratyphi, Salmonella typhi, Salmonella typhimurium, Shigella boydii, Shigella dysenteriae, Shigella flexneri, Shigella sonnei, Staphylococcus aureus, Staphylococcus epidermidis, Staphylococcus haemolyticus, Streptococcus pneumoniae, Streptococcus mutans, Streptococcus pyogenes, Treponema pallidum, Ureaplasma urealyticum, Vibrio cholerae, Vibrio parahaemolyticus, Vibrio vulnificans, Yersinia enterocolitica, Yersinia pestis or any species falling within the genera of any of the above species can be used to inhibit the proliferation Acinetobacter baumannii, Anaplasma marginale, Bacillus anthracis, Bacteroides fragilis, Bordetella pertussis, Borrelia burgdorferi, Brucella abortus, Brucella melitensis, Burkholderia cepacia, Burkholderia fungorum, Burkholderia mallei, Campylobacter jejuni, Chlamydia pneumoniae, Chlamydia trachomatis, Clostridium acetobutylicum, Clostridium botulinum, Clostridium difficile, Clostridium perfringens, Corynebacterium diptheriae, Coxiella burnetii, Enterobacter cloacae, Enterococcus faecalis, Enterococcus faecium, Escherichia coli, Francisella tularensis, Haemophilus influenzae, Helicobacter pylori, Klebsiella pneumoniae, Legionella pneumophila, Listeria monocytogenes, Moraxella catarrhalis, Mycobacterium avium, Mycobacterium bovis, Mycobacterium leprae, Mycobacterium tuberculosis, Mycoplasma genitalium, Mycoplasma pneumoniae, Neisseria gonorrhoeae, Neisseria meningitidis, Nocardia asteroides, Pasteurella haemolytica, Pasteurella multocida, Proteus mirabilis, Proteus vulgaris, Pseudomonas aeruginosa, Pseudomonas putida, Pseudomonas syringae, Rickettsia rickettsii, Rochalimaea quintana, Salmonella bongori, Salmonella cholerasuis, Salmonella enterica, Salmonella paratyphi, Salmonella typhi, Salmonella typhimurium, Shigella boydii, Shigella dysenteriae, Shigella flexneri, Shigella sonnei, Staphylococcus aureus, Staphylococcus epidermidis, Staphylococcus haemolyticus, Streptococcus pneumoniae, Streptococcus mutans, Streptococcus pyogenes, Treponema pallidum, Ureaplasma urealyticum, Vibrio cholerae, Vibrio parahaemolyticus, Vibrio vulnificans, Yersinia enterocolitica, Yersinia pestis or any species falling within the genera of any of the above species thereby sensitizing the cells for use in any of the cell-based assays described herein.

[0744] Due in part to the increased appearance of antibiotic resistance in pathogenic microorganisms and to the significant side-effects associated with some currently used antibiotics, novel antibiotics acting at new targets are highly sought after in the art. Yet, another limitation in the current art related to cell-based assays is the problem of repeatedly identifying hits against the same kinds of target molecules in the same limited set of biological pathways. This may occur when compounds acting at such new targets are discarded, ignored or fail to be detected because compounds acting at the “old” targets are encountered more frequently and are more potent than compounds acting at the new targets. As a result, the majority of antibiotics in use currently interact with a relatively small number of target molecules within an even more limited set of biological pathways.

[0745] The use of sensitized cells of the current invention provides a solution to the above problem in two ways. First, desired compounds acting at a target of interest, whether a new target or a previously known but poorly exploited target, can now be detected above the “noise” of compounds acting at the “old” targets due to the specific and substantial increase in potency of such desired compounds when tested on the sensitized cells of the current invention. Second, the methods used to sensitize cells to compounds acting at a target of interest may also sensitize these cells to compounds acting at other target molecules within the same biological pathway. For example, expression of an antisense molecule to a an operon encoding one or more ribosomal proteins is expected to sensitize the cell to compounds acting on those ribosomal proteins and may also sensitize the cells to compounds acting at any of the ribosomal components (proteins or rRNA) or even to compounds acting at any target which is part of the protein synthesis pathway. Thus an important advantage of the present invention is the ability to reveal new targets and pathways that were previously not readily accessible to drug discovery methods.

[0746] Sensitized cells of the present invention are prepared by reducing the activity or level of a proliferation-required target that is encoded by a gene that is contained within a proliferation-required operon. The target molecule may be a gene product, such as an RNA or polypeptide produced from a proliferation-required gene, including the genes of SEQ ID NOs: 201-550, or a gene in a proliferation-required operon predicted by the methods described herein from Acinetobacter baumannii, Anaplasma marginale, Bacillus anthracis, Bacteroides fragilis, Bordetella pertussis, Borrelia burgdorferi, Brucella abortus, Brucella melitensis, Burkholderia cepacia, Burkholderia fungorum, Burkholderia mallei, Campylobacter jejuni, Chlamydia pneumoniae, Chlamydia trachomatis, Clostridium acetobutylicum, Clostridium botulinum, Clostridium difficile, Clostridium perfringens, Corynebacterium diptheriae, Coxiella burnetii, Enterobacter cloacae, Enterococcus faecalis, Enterococcus faecium, Escherichia coli, Francisella tularensis, Haemophilus influenzae, Helicobacter pylori, Klebsiella pneumoniae, Legionella pneumophila, Listeria monocytogenes, Moraxella catarrhalis, Mycobacterium avium, Mycobacterium bovis, Mycobacterium leprae, Mycobacterium tuberculosis, Mycoplasma genitalium, Mycoplasma pneumoniae, Neisseria gonorrhoeae, Neisseria meningitidis, Nocardia asteroides, Pasteurella haemolytica, Pasteurella multocida, Proteus mirabilis, Proteus vulgaris, Pseudomonas aeruginosa, Pseudomonas putida, Pseudomonas syringae, Rickettsia rickettsii, Rochalimaea quintana, Salmonella bongori, Salmonella cholerasuis, Salmonella enterica, Salmonella paratyphi, Salmonella typhi, Salmonella typhimurium, Shigella boydii, Shigella dysenteriae, Shigella flexneri, Shigella sonnei, Staphylococcus aureus, Staphylococcus epidermidis, Staphylococcus haemolyticus, Streptococcus pneumoniae, Streptococcus mutans, Streptococcus pyogenes, Treponema pallidum, Ureaplasma urealyticum, Vibrio cholerae, Vibrio parahaemolyticus, Vibrio vulnificans, Yersinia enterocolitica, Yersinia pestis or any species falling within the genera of any of the above species. An antisense complementary to at least a portion of a proliferation-required operon which encodes the target molecule can be used to inhibit the proliferation thereby sensitizing Acinetobacter baumannii, Anaplasma marginale, Bacillus anthracis, Bacteroides fragilis, Bordetella pertussis, Borrelia burgdorferi, Brucella abortus, Brucella melitensis, Burkholderia cepacia, Burkholderia fungorum, Burkholderia mallei, Campylobacter jejuni, Chlamydia pneumoniae, Chlamydia trachomatis, Clostridium acetobutylicum, Clostridium botulinum, Clostridium difficile, Clostridium perfringens, Corynebacterium diptheriae, Coxiella burnetii, Enterobacter cloacae, Enterococcus faecalis, Enterococcus faecium, Escherichia coli, Francisella tularensis, Haemophilus influenzae, Helicobacter pylori, Klebsiella pneumoniae, Legionella pneumophila, Listeria monocytogenes, Moraxella catarrhalis, Mycobacterium avium, Mycobacterium bovis, Mycobacterium leprae, Mycobacterium tuberculosis, Mycoplasma genitalium, Mycoplasma pneumoniae, Neisseria gonorrhoeae, Neisseria meningitidis, Nocardia asteroides, Pasteurella haemolytica, Pasteurella multocida, Proteus mirabilis, Proteus vulgaris, Pseudomonas aeruginosa, Pseudomonas putida, Pseudomonas syringae, Rickettsia rickettsii, Rochalimaea quintana, Salmonella bongori, Salmonella cholerasuis, Salmonella enterica, Salmonella paratyphi, Salmonella typhi, Salmonella typhimurium, Shigella boydii, Shigella dysenteriae, Shigella flexneri, Shigella sonnei, Staphylococcus aureus, Staphylococcus epidermidis, Staphylococcus haemolyticus, Streptococcus pneumoniae, Streptococcus mutans, Streptococcus pyogenes, Treponema pallidum, Ureaplasma urealyticum, Vibrio cholerae, Vibrio parahaemolyticus, Vibrio vulnificans, Yersinia enterocolitica, Yersinia pestis or any species falling within the genera of any of the above species. Biological pathways which can be sensitized by antisense-based operon inhibition include, but are not limited to, enzymatic, biochemical and metabolic pathways as well as pathways involved in the production of cellular structures such as the cell wall.

[0747] Current methods employed in the arts of medicinal and combinatorial chemistries are able to make use of structure-activity relationship information derived from testing compounds in various biological assays including direct binding assays and cell-based assays. Occasionally compounds are directly identified in such assays that are sufficiently potent to be developed as drugs. More often, initial hit compounds exhibit moderate or low potency. Once a hit compound is identified with low or moderate potency, directed libraries of compounds are synthesized and tested in order to identify more potent leads. Generally these directed libraries are combinatorial chemical libraries consisting of compounds with structures related to the hit compound but containing systematic variations including additions, subtractions and substitutions of various structural features. When tested for activity against the target molecule, structural features are identified that either alone or in combination with other features enhance or reduce activity. This information is used to design subsequent directed libraries containing compounds with enhanced activity against the target molecule. After one or several iterations of this process, compounds with substantially increased activity against the target molecule are identified and may be further developed as drugs. This process is facilitated by use of the sensitized cells of the present invention since compounds acting at the selected targets exhibit increased potency in such cell-based assays, thus; more compounds can now be characterized providing more useful information than would be obtained otherwise.

[0748] Thus, it is now possible using cell-based assays of the present invention to identify or characterize compounds that previously would not have been readily identified or characterized including compounds that act at targets that previously were not readily exploited using cell-based assays. The process of evolving potent drug leads from initial hit compounds is also substantially improved by the cell-based assays of the present invention because, for the same number of test compounds, more structure-function relationship information is likely to be revealed.

[0749] The method of sensitizing a cell entails selecting a suitable operon. A suitable operon is one whose transcription and/or expression is required for the proliferation of the cell that is to be sensitized. The next step is to introduce into the cells to be sensitized, an antisense RNA capable of hybridizing to at least a portion of the suitable operon or to the RNA encoded by the suitable operon. Introduction of the antisense RNA can be in the form of a vector in which antisense RNA is produced under the control of an inducible promoter. The amount of antisense RNA produced is modulated by varying an inducer concentration to which the cell is exposed and thereby varying the activity of the promoter driving transcription of the antisense RNA. Thus, cells are sensitized by exposing them to an inducer concentration that results in a sub-lethal level of antisense RNA expression. The requisite amount of inducer may be derived empirically by one of skill in the art.

[0750] In one embodiment of the cell-based assays, an antisense nucleic acid that is complementary to at least a portion of a proliferation-required operon comprising a nucleotide sequence selected from the group consisting of SEQ ID NOs: 1-194 can be used to sensitize Acinetobacter baumannii, Anaplasma marginale, Bacillus anthracis, Bacteroides fragilis, Bordetella pertussis, Borrelia burgdorferi, Brucella abortus, Brucella melitensis, Burkholderia cepacia, Burkholderia fungorum, Burkholderia mallei, Campylobacter jejuni, Chlamydia pneumoniae, Chlamydia trachomatis, Clostridium acetobutylicum, Clostridium botulinum, Clostridium difficile, Clostridium perfringens, Corynebacterium diptheriae, Coxiella burnetii, Enterobacter cloacae, Enterococcus faecalis, Enterococcus faecium, Escherichia coli, Francisella tularensis, Haemophilus influenzae, Helicobacter pylori, Klebsiella pneumoniae, Legionella pneumophila, Listeria monocytogenes, Moraxella catarrhalis, Mycobacterium avium, Mycobacterium bovis, Mycobacterium leprae, Mycobacterium tuberculosis, Mycoplasma genitalium, Mycoplasma pneumoniae, Neisseria gonorrhoeae, Neisseria meningitidis, Nocardia asteroides, Pasteurella haemolytica, Pasteurella multocida, Proteus mirabilis, Proteus vulgaris, Pseudomonas aeruginosa, Pseudomonas putida, Pseudomonas syringae, Rickettsia rickettsii, Rochalimaea quintana, Salmonella bongori, Salmonella cholerasuis, Salmonella enterica, Salmonella paratyphi, Salmonella typhi, Salmonella typhimurium, Shigella boydii, Shigella dysenteriae, Shigella flexneri, Shigella sonnei, Staphylococcus aureus, Staphylococcus epidermidis, Staphylococcus haemolyticus, Streptococcus pneumoniae, Streptococcus mutans, Streptococcus pyogenes, Treponema pallidum, Ureaplasma urealyticum, Vibrio cholerae, Vibrio parahaemolyticus, Vibrio vulnificans, Yersinia enterocolitica, Yersinia pestis or any species falling within the genera of any of the above species for use in cell-based assays.

[0751] In another embodiment of the cell-based assays, an antisense nucleic acid complementary to at least a portion of an operon that contains a proliferation-required gene that is homologous to a gene having a nucleotide sequence selected from the group consisting of SEQ ID NOs: 201-550 or complementary to at least a portion of an operon that contains a gene encoding a proliferation-required gene product that is homologous to a polypeptide having an amino acid sequence selected from the group consisting of SEQ ID NOs: 551-824 can be used can be used to sensitize Acinetobacter baumannii, Anaplasma marginale, Bacillus anthracis, Bacteroides fragilis, Bordetella pertussis, Borrelia burgdorferi, Brucella abortus, Brucella melitensis, Burkholderia cepacia, Burkholderia fungorum, Burkholderia mallei, Campylobacter jejuni, Chlamydia pneumoniae, Chlamydia trachomatis, Clostridium acetobutylicum, Clostridium botulinum, Clostridium difficile, Clostridium perfringens, Corynebacterium diptheriae, Coxiella burnetii, Enterobacter cloacae, Enterococcus faecalis, Enterococcus faecium, Escherichia coli, Francisella tularensis, Haemophilus influenzae, Helicobacter pylori, Klebsiella pneumoniae, Legionella pneumophila, Listeria monocytogenes, Moraxella catarrhalis, Mycobacterium avium, Mycobacterium bovis, Mycobacterium leprae, Mycobacterium tuberculosis, Mycoplasma genitalium, Mycoplasma pneumoniae, Neisseria gonorrhoeae, Neisseria meningitidis, Nocardia asteroides, Pasteurella haemolytica, Pasteurella multocida, Proteus mirabilis, Proteus vulgaris, Pseudomonas aeruginosa, Pseudomonas putida, Pseudomonas syringae, Rickettsia rickettsii, Rochalimaea quintana, Salmonella bongori, Salmonella cholerasuis, Salmonella enterica, Salmonella paratyphi, Salmonella typhi, Salmonella typhimurium, Shigella boydii, Shigella dysenteriae, Shigella flexneri, Shigella sonnei, Staphylococcus aureus, Staphylococcus epidermidis, Staphylococcus haemolyticus, Streptococcus pneumoniae, Streptococcus mutans, Streptococcus pyogenes, Treponema pallidum, Ureaplasma urealyticum, Vibrio cholerae, Vibrio parahaemolyticus, Vibrio vulnificans, Yersinia enterocolitica, Yersinia pestis or any species falling within the genera of any of the above species for use in cell-based assays.

[0752] In another embodiment of the cell-based assays, antisense nucleic acids complementary to identified proliferation-required operons, or portions thereof, in Acinetobacter baumannii, Anaplasma marginale, Bacillus anthracis, Bacteroides fragilis, Bordetella pertussis, Borrelia burgdorferi, Brucella abortus, Brucella melitensis, Burkholderia cepacia, Burkholderia fungorum, Burkholderia mallei, Campylobacter jejuni, Chlamydia pneumoniae, Chlamydia trachomatis, Clostridium acetobutylicum, Clostridium botulinum, Clostridium difficile, Clostridium perfringens, Corynebacterium diptheriae, Coxiella burnetii, Enterobacter cloacae, Enterococcus faecalis, Enterococcus faecium, Escherichia coli, Francisella tularensis, Haemophilus influenzae, Helicobacter pylori, Klebsiella pneumoniae, Legionella pneumophila, Listeria monocytogenes, Moraxella catarrhalis, Mycobacterium avium, Mycobacterium bovis, Mycobacterium leprae, Mycobacterium tuberculosis, Mycoplasma genitalium, Mycoplasma pneumoniae, Neisseria gonorrhoeae, Neisseria meningitidis, Nocardia asteroides, Pasteurella haemolytica, Pasteurella multocida, Proteus mirabilis, Proteus vulgaris, Pseudomonas aeruginosa, Pseudomonas putida, Pseudomonas syringae, Rickettsia rickettsii, Rochalimaea quintana, Salmonella bongori, Salmonella cholerasuis, Salmonella enterica, Salmonella paratyphi, Salmonella typhi, Salmonella typhimurium, Shigella boydii, Shigella dysenteriae, Shigella flexneri, Shigella sonnei, Staphylococcus aureus, Staphylococcus epidermidis, Staphylococcus haemolyticus, Streptococcus pneumoniae, Streptococcus mutans, Streptococcus pyogenes, Treponema pallidum, Ureaplasma urealyticum, Vibrio cholerae, Vibrio parahaemolyticus, Vibrio vulnificans, Yersinia enterocolitica, Yersinia pestis or any species falling within the genera of any of the above species can be used to sensitize Acinetobacter baumannii, Anaplasma marginale, Bacillus anthracis, Bacteroides fragilis, Bordetella pertussis, Borrelia burgdorferi, Brucella abortus, Brucella melitensis, Burkholderia cepacia, Burkholderia fungorum, Burkholderia mallei, Campylobacter jejuni, Chlamydia pneumoniae, Chlamydia trachomatis, Clostridium acetobutylicum, Clostridium botulinum, Clostridium difficile, Clostridium perfringens, Corynebacterium diptheriae, Coxiella burnetii, Enterobacter cloacae, Enterococcus faecalis, Enterococcus faecium, Escherichia coli, Francisella tularensis, Haemophilus influenzae, Helicobacter pylori, Klebsiella pneumoniae, Legionella pneumophila, Listeria monocytogenes, Moraxella catarrhalis, Mycobacterium avium, Mycobacterium bovis, Mycobacterium leprae, Mycobacterium tuberculosis, Mycoplasma genitalium, Mycoplasma pneumoniae, Neisseria gonorrhoeae, Neisseria meningitidis, Nocardia asteroides, Pasteurella haemolytica, Pasteurella multocida, Proteus mirabilis, Proteus vulgaris, Pseudomonas aeruginosa, Pseudomonas putida, Pseudomonas syringae, Rickettsia rickettsii, Rochalimaea quintana, Salmonella bongori, Salmonella cholerasuis, Salmonella enterica, Salmonella paratyphi, Salmonella typhi, Salmonella typhimurium, Shigella boydii, Shigella dysenteriae, Shigella flexneri, Shigella sonnei, Staphylococcus aureus, Staphylococcus epidermidis, Staphylococcus haemolyticus, Streptococcus pneumoniae, Streptococcus mutans, Streptococcus pyogenes, Treponema pallidum, Ureaplasma urealyticum, Vibrio cholerae, Vibrio parahaemolyticus, Vibrio vulnificans, Yersinia enterocolitica, Yersinia pestis or any species falling within the genera of any of the above species for use in cell-based assays.

[0753] Vectors producing antisense RNA complementary to identified operons required for proliferation, or portions thereof, are used to limit the concentration of a proliferation-required protein without severely inhibiting growth. The proliferation-required protein may be one of the proteins of SEQ ID NOs.: 551-824 or a homologous polypeptide. To achieve that goal, a growth inhibition dose curve of inducer is calculated by plotting various doses of inducer against the corresponding growth inhibition caused by the antisense expression. From this S curve, the concentration of inducer needed to achieve various percentages of antisense induced growth inhibition, from 1 to 100% can be determined.

[0754] A variety of different regulatable promoters may be used to produce the proliferation-inhibiting antisense nucleic acid. Transcription from the regulatable promoters may be modulated by controlling the activity of a transcription factor repressor which acts at the regulatable promoter. For example, if transcription is modulated by affecting the activity of a repressor, the choice of inducer to be used depends on the repressor/operator responsible for regulating transcription of the antisense nucleic acid. If the regulatable promoter comprises a T5 promoter fused to a xylO (xylose operator; e.g. derived from Staphylococcus xylosis (Schnappinger, D. et al., FEMS Microbiol. Let. 129: 126214-423978 (1995), the disclosure of which is incorporated herein by reference in its entirety) then transcription of the antisense nucleic acid may be regulated by a xylose repressor. The xylose repressor may be provided by ectoptic expression within an S. aureus cell of an exogenous xylose repressor gene, e.g. derived from S. xylosis DNA. In such cases transcription of antisense RNA from the promoter is inducible by adding xylose to the medium and the promoter is thus “xylose inducible.” Similarly, IPTG inducible promoters may be used. For example, the highest concentration of the inducer that does not reduce the growth rate significantly can be estimated from the curve. Cellular proliferation can be monitored by growth medium turbidity via OD measurements. In another example, the concentration of inducer that reduces growth by 25% can be predicted from the curve. In still another example, a concentration of inducer that reduces growth by 50% can be calculated. Additional parameters such as colony forming units (cfu) can be used to measure cellular viability. Some embodiments of the present invention contemplate the use of a vector that comprises a regulatable fusion promoter selected from a suite of fusion promoters wherein the promoter suite is useful for modulating both the basal and maximal levels of transcription of a nucleic acid over a wide dynamic range thus allowing the desired level of production of a transcript which corresponds to a nucleic acid described herein. Such promoters are described in U.S. patent application Ser. No. 10/032,393, entitled BACTERIAL PROMOTERS AND METHODS OF USE, filed Dec. 21, 2001, the disclosure of which is incorporated herein by reference in its entirety.

[0755] In some embodiments, the methods for the production of stabilized RNA in Gram-negative organisms, as described in U.S. patent application Ser. No. 10/327592, entitled STABILIZED NUCLEIC ACIDS IN GENE AND DRUG DISCOVERY AND METHODS OF USE, filed Dec. 20, 2002, the disclosure of which is incorporated herein by reference in its entirety, are used for the production of proliferation-inhibiting transcripts corresponding to the proliferation-required operon. Briefly, the stabilized antisense RNA may comprise an antisense RNA which was identified as inhibiting proliferation as described above which has been engineered to contain at least one stem loop flanking each end of the antisense nucleic acid. In some embodiments, the at least one stem-loop structure formed at the 5′ end of the stabilized antisense nucleic acid comprises a flush, double stranded 5′ end. In some embodiments, one or more of the stem loops comprises a rho independent terminator. In additional embodiments, the stabilized antisense RNA lacks a ribosome binding site. In further embodiments, the stabilized RNA lacks sites which are cleaved by one or more RNAses, such as RNAse E or RNAse III. In some embodiments, the stabilized antisense RNA may be transcribed in a cell which the activity of at least one enzyme involved in RNA degradation has been reduced. For example, the activity of an enzyme such as RNase E, RNase II, RNase III, polynucleotide phosphorylase, and poly(A) polymerase, RNA helicase, enolase or an enzyme having similar functions may be reduced in the cell.

[0756] In some embodiments of the present invention, promoter replacement methods, such as those describe above and in U.S. patent application Ser. No. 09/948,993, entitled RAPID METHOD FOR REGULATING GENE EXPRESSION, filed Sep. 6, 2001, the disclosure of which is incorporated herein by reference in its entirety, are used to regulate expression of the proliferation-required operon or of proliferation-required genes contained within the operon.

[0757] Cells to be assayed are exposed to the above-determined concentrations of inducer. The presence of the inducer at this sub-lethal concentration reduces the amount of the proliferation required gene product to a sub-optimal amount in the cell that will still support growth. Cells grown in the presence of this concentration of inducer are therefore specifically more sensitive to inhibitors of the proliferation-required protein or RNA of interest or to inhibitors of proteins or RNAs in the same biological pathway as the proliferation-required protein or RNA of interest but not to inhibitors of unrelated proteins or RNAs.

[0758] Cells pretreated with sub-inhibitory concentrations of inducer and thus containing a reduced amount of proliferation-required target gene product are then used to screen for compounds that reduce cell growth. The sub-lethal concentration of inducer may be any concentration consistent with the intended use of the assay to identify candidate compounds to which the cells are more sensitive. For example, the sub-lethal concentration of the inducer may be such that growth inhibition is at least about 5%, at least about 8%, at least about 10%, at least about 20%, at least about 30%, at least about 40%, at least about 50%, at least about 60% at least about 75%, or more. Cells which are pre-sensitized using the preceding method are more sensitive to inhibitors of the target protein because these cells contain less target protein to inhibit than do wild-type cells.

[0759] When screening for antimicrobial agents against a gene product required for proliferation, growth inhibition of cells containing a limiting amount of that proliferation-required gene product can be assayed. Growth inhibition can be measured by directly comparing the amount of growth, measured by the optical density of the growth medium, between an experimental sample and a control sample. Alternative methods for assaying cell proliferation include measuring the signal from a reporter construct, various enzymatic activity assays, and other methods well known in the art.

[0760] It will be appreciated that the above method may be performed in solid phase, liquid phase or a combination of the two. For example, cells grown on nutrient agar containing the inducer of the antisense construct may be exposed to compounds spotted onto the agar surface. If desired, the cells may be grown on agar containing varying concentrations of the inducer. A compound's effect may be judged from the diameter of the resulting killing zone, the area around the compound application point in which cells do not grow. Multiple compounds may be transferred to agar plates and simultaneously tested using automated and semi-automated equipment including but not restricted to multi-channel pipettes (for example the Beckman Multimek) and multi-channel spotters (for example the Genomic Solutions Flexys). In this way multiple plates and thousands to millions of compounds may be tested per day.

[0761] The compounds may also be tested entirely in liquid phase using microtiter plates as described below. Liquid phase screening may be performed in microtiter plates containing 96, 384, 1536 or more wells per microtiter plate to screen multiple plates and thousands to millions of compounds per day. Automated and semi-automated equipment may be used for addition of reagents (for example cells and compounds) and determination of cell density.

### Example 14

### Cell-Based Assay Using Antisense Complementary to Genes Encoding Ribosomal Proteins

[0762] The effectiveness of the above cell-based assay was validated using constructs transcribing antisense RNA to the proliferation required Escherichia coli genes rplL, rplJ, and rplW encoding ribosomal proteins L7/L12, L10 and L23 respectively. These proteins are essential components of the protein synthesis apparatus of the cell and as such are required for proliferation. These constructs were used to test the effect of antisense transcription on cell sensitivity to antibiotics known to bind to the ribosome and thereby inhibit protein synthesis. Constructs transcribing antisense RNA to several other genes (elaD, visC, yohH, and atpE/B), the products of which are not involved in protein synthesis were used for comparison.

[0763] First, pLex5BA (Krause et al., J. Mol. Biol. 274: 365 (1997), the disclosure of which is incorporated herein by reference in its entirety) vectors containing antisense constructs to either rplW or to elaD were introduced into separate E. coli cell populations. Vector introduction is a technique well known to those of ordinary skill in the art. The vectors of this example contain IPTG inducible promoters that drive the transcription of the antisense RNA in the presence of the inducer. However, those skilled in the art will appreciate that other inducible promoters may also be used. Suitable vectors are also well known in the art. For example, a number of promoters useful for nucleic acid transcription (including the nucleic acids described herein) in Enterococcus faecalis, Staphylococcus aureus as well as other Gram positive organisms are described in U.S. patent application Ser. No. 10/032,393, filed Dec. 21, 2001, the disclosure of which is incorporated herein by reference in its entirety. Antisense clones to genes encoding different ribosomal proteins or to genes encoding proteins that are not involved in protein synthesis were utilized to test the effect of antisense transcription on cell sensitivity to the antibiotics known to bind to ribosomal proteins and inhibit protein synthesis. Antisense nucleic acids comprising a nucleotide sequence complementary to the elaD, atpB&atpE, visC and yohH genes are referred to as AS-elaD, AS-atpB/E, AS-visC, AS-yohH respectively. These genes are not known to be involved in protein synthesis. Antisense nucleic acids to the rplL, rplL&rplJ and rplW genes are referred to as AS-rplL, AS-rpIL/J, and AS-rplW respectively. These genes encode ribosomal proteins L7/L12 (rplL) L10(rplJ) and L23 (rplW). Vectors containing these antisense nucleic acids were introduced into separate E. coli cell populations.

[0764] The cell populations containing vectors producing AS-elaD or AS-rplW were exposed to a range of IPTG concentrations in liquid medium to obtain the growth inhibitory dose curve for each clone (FIG. 7). First, seed cultures were grown to a particular turbidity measured by the optical density (OD) of the growth solution. The OD of the solution is directly related to the number of bacterial cells contained therein. Subsequently, sixteen 200 μl liquid medium cultures were grown in a 96 well microtiter plate at 37° C. with a range of IPTG concentrations in duplicate two-fold serial dilutions from 1600 μM to 12.5 μM (final concentration). Additionally, control cells were grown in duplicate without IPTG. These cultures were started from an inoculum of equal amounts of cells derived from the same initial seed culture of a clone of interest. The cells were grown for up to 15 hours and the extent of growth was determined by measuring the optical density of the cultures at 600 nm. When the control culture reached mid-log phase the percent growth (relative to the control culture) for each of the IPTG containing cultures was plotted against the log concentrations of IPTG to produce a growth inhibitory dose response curve for the IPTG. The concentration of IPTG that inhibits cell growth to 50% (IC₅₀) as compared to the 0 mM IPTG control (0% growth inhibition) was then calculated from the curve. Under these conditions, an amount of antisense RNA was produced that reduced the expression levels of rplW or elaD to a degree such that growth of cells containing their respective antisense vectors was inhibited by 50%.

[0765] Alternative methods of measuring growth are also contemplated. Examples of these methods include measurements of proteins, the expression of which is engineered into the cells being tested and can readily be measured. Examples of such proteins include luciferase and various enzymes.

[0766] Cells were pretreated with the selected concentration of IPTG and then used to test the sensitivity of cell populations to tetracycline, erythromycin and other known protein synthesis inhibitors. FIG. 7 is an IPTG dose response curve in E. coli transformed with an IPTG-inducible plasmid containing either an antisense clone to the E. coli rplW gene (AS-rplW) which encodes ribosomal protein L23 which is required for protein synthesis and essential for cell proliferation, or an antisense clone to the elaD (AS-elaD) gene which is not known to be involved in protein synthesis.

[0767] An example of a tetracycline dose response curve is shown in FIGS. 8A and 13B for the rplW and elaD genes, respectively. Cells were grown to log phase and then diluted into medium alone or medium containing IPTG at concentrations which give 20% and 50% growth inhibition as determined by IPTG dose response curves. After 2.5 hours, the cells were diluted to a final OD₆₀₀ of 0.002 into 96 well plates containing (1) +/− IPTG at the same concentrations used for the 2.5 hour pre-incubation; and (2) serial two-fold dilutions of tetracycline such that the final concentrations of tetracycline range from 1 μg/ml to 15.6 ng/ml and 0 μg/ml. The 96 well plates were incubated at 37° C. and the OD₆₀₀ was read by a plate reader every 5 minutes for up to 15 hours. For each IPTG concentration and the no IPTG control, tetracycline dose response curves were determined when the control (absence of tetracycline) reached 0.1 OD₆₀₀.

[0768] To compare tetracycline sensitivity with and without IPTG, tetracycline IC₅₀ₛ were determined from the dose response curves (FIGS. 8A-B). Cells transcribing antisense nucleic acids AS-rplL or AS-rplW to genes encoding ribosomal proteins L7/L12 and L23 respectively showed increased sensitivity to tetracycline (FIG. 8A) as compared to cells with reduced levels of the elaD gene product (AS-elaD) (FIG. 8B). FIG. 9 shows a summary bar chart in which the ratios of tetracycline IC₅₀ₛ, determined in the presence of IPTG which gives 50% growth inhibition versus tetracycline IC₅₀ₛ determined without IPTG (fold increase in tetracycline sensitivity) were plotted. Cells with reduced levels of either L7/L12 (encoded by genes rplL, rplJ) or L23 (encoded by the rplW gene) showed increased sensitivity to tetracycline (FIG. 9). Cells expressing antisense to genes not known to be involved in protein synthesis (AS-atpB/E, AS-visC, AS-elaD, AS-yohH) did not show the same increased sensitivity to tetracycline, validating the specificity of this assay (FIG. 9).

[0769] In addition to the above, it has been observed in initial experiments that clones transcribing antisense RNA to genes involved in protein synthesis (including genes encoding ribosomal proteins L7/L12 & L10, L7/L12 alone, L22, and L18, as well as genes encoding rRNA and Elongation Factor G) have increased sensitivity to the macrolide, erythromycin, whereas clones transcribing antisense to the non-protein synthesis genes elaD, atpB/E and visC do not. Furthermore, the clone transcribing antisense to rplL and rplJ (AS-rplL/J) does not show increased sensitivity to nalidixic acid and ofloxacin, antibiotics which do not inhibit protein synthesis.

[0770] The results with the ribosomal protein genes rplL, rplJ, and rplW as well as the initial results using various other antisense clones and antibiotics show that limiting the concentration of an antibiotic target makes cells more sensitive to the antimicrobial agents that specifically interact with that protein. The results also show that these cells are sensitized to antimicrobial agents that inhibit the overall function in which the protein target is involved but are not sensitized to antimicrobial agents that inhibit other functions.

[0771] It will be appreciated that the cell-based assays described above may be implemented by providing an antisense nucleic acid complementary to at least a portion of an operon comprising a nucleotide sequence selected from the group consisting of SEQ ID NOs: 1-194, wherein the portion does not include a nucleotide sequence selected from the group consisting of SEQ ID NOs: 201-550 to Staphylococcus aureus or an organism selected from the group consisting of Acinetobacter baumannii, Anaplasma marginale, Bacillus anthracis, Bacteroides fragilis, Bordetella pertussis, Borrelia burgdorferi, Brucella abortus, Brucella melitensis, Burkholderia cepacia, Burkholderia fungorum, Burkholderia mallei, Campylobacter jejuni, Chlamydia pneumoniae, Chlamydia trachomatis, Clostridium acetobutylicum, Clostridium botulinum, Clostridium difficile, Clostridium perfringens, Corynebacterium diptheriae, Coxiella burnetii, Enterobacter cloacae, Enterococcus faecalis, Enterococcus faecium, Escherichia coli, Francisella tularensis, Haemophilus influenzae, Helicobacter pylori, Klebsiella pneumoniae, Legionella pneumophila, Listeria monocytogenes, Moraxella catarrhalis, Mycobacterium avium, Mycobacterium bovis, Mycobacterium leprae, Mycobacterium tuberculosis, Mycoplasma genitalium, Mycoplasma pneumoniae, Neisseria gonorrhoeae, Neisseria meningitidis, Nocardia asteroides, Pasteurella haemolytica, Pasteurella multocida, Proteus mirabilis, Proteus vulgaris, Pseudomonas aeruginosa, Pseudomonas putida, Pseudomonas syringae, Rickettsia rickettsii, Rochalimaea quintana, Salmonella bongori, Salmonella cholerasuis, Salmonella enterica, Salmonella paratyphi, Salmonella typhi, Salmonella typhimurium, Shigella boydii, Shigella dysenteriae, Shigella flexneri, Shigella sonnei, Staphylococcus aureus, Staphylococcus epidermidis, Staphylococcus haemolyticus, Streptococcus pneumoniae, Streptococcus mutans, Streptococcus pyogenes, Treponema pallidum, Ureaplasma urealyticum, Vibrio cholerae, Vibrio parahaemolyticus, Vibrio vulnificans, Yersinia enterocolitica, Yersinia pestis or any species falling within the genera of any of the above species.

[0772] It will also be appreciated that the cell-based assays described above may be implemented by providing an antisense nucleic acid complementary to at least a portion of a proliferation-required operon comprising a gene that is homologous to a proliferation-required gene having a nucleotide sequence selected from the group consisting of SEQ ID NOs: 201-550 or by providing an antisense nucleic acid complementary to at least a portion of a proliferation-required operon comprising a gene encoding a polypeptide that is homologous to a proliferation-required polypeptide having an amino acid sequence selected from the group consisting of SEQ ID NOs: 551-824 to an organism selected from the group consisting of Acinetobacter baumannii, Anaplasma marginale, Bacillus anthracis, Bacteroides fragilis, Bordetella pertussis, Borrelia burgdorferi, Brucella abortus, Brucella melitensis, Burkholderia cepacia, Burkholderia fungorum, Burkholderia mallei, Campylobacter jejuni, Chlamydia pneumoniae, Chlamydia trachomatis, Clostridium acetobutylicum, Clostridium botulinum, Clostridium difficile, Clostridium perfringens, Corynebacterium diptheriae, Coxiella burnetii, Enterobacter cloacae, Enterococcus faecalis, Enterococcus faecium, Escherichia coli, Francisella tularensis, Haemophilus influenzae, Helicobacter pylori, Klebsiella pneumoniae, Legionella pneumophila, Listeria monocytogenes, Moraxella catarrhalis, Mycobacterium avium, Mycobacterium bovis, Mycobacterium leprae, Mycobacterium tuberculosis, Mycoplasma genitalium, Mycoplasma pneumoniae, Neisseria gonorrhoeae, Neisseria meningitidis, Nocardia asteroides, Pasteurella haemolytica, Pasteurella multocida, Proteus mirabilis, Proteus vulgaris, Pseudomonas aeruginosa, Pseudomonas putida, Pseudomonas syringae, Rickettsia rickettsii, Rochalimaea quintana, Salmonella bongori, Salmonella cholerasuis, Salmonella enterica, Salmonella paratyphi, Salmonella typhi, Salmonella typhimurium, Shigella boydii, Shigella dysenteriae, Shigella flexneri, Shigella sonnei, Staphylococcus aureus, Staphylococcus epidermidis, Staphylococcus haemolyticus, Streptococcus pneumoniae, Streptococcus mutans, Streptococcus pyogenes, Treponema pallidum, Ureaplasma urealyticum, Vibrio cholerae, Vibrio parahaemolyticus, Vibrio vulnificans, Yersinia enterocolitica, Yersinia pestis or any species falling within the genera of any of the above species.

[0773] It will also be appreciated that the cell-based assays described above may be implemented by providing an antisense nucleic acid complementary to at least a portion of a proliferation-required operon, which has been identified by the methods described herein, to an organism selected from the group consisting of Acinetobacter baumannii, Anaplasma marginale, Bacillus anthracis, Bacteroides fragilis, Bordetella pertussis, Borrelia burgdorferi, Brucella abortus, Brucella melitensis, Burkholderia cepacia, Burkholderia fungorum, Burkholderia mallei, Campylobacter jejuni, Chlamydia pneumoniae, Chlamydia trachomatis, Clostridium acetobutylicum, Clostridium botulinum, Clostridium difficile, Clostridium perfringens, Corynebacterium diptheriae, Coxiella burnetii, Enterobacter cloacae, Enterococcus faecalis, Enterococcus faecium, Escherichia coli, Francisella tularensis, Haemophilus influenzae, Helicobacter pylori, Klebsiella pneumoniae, Legionella pneumophila, Listeria monocytogenes, Moraxella catarrhalis, Mycobacterium avium, Mycobacterium bovis, Mycobacterium leprae, Mycobacterium tuberculosis, Mycoplasma genitalium, Mycoplasma pneumoniae, Neisseria gonorrhoeae, Neisseria meningitidis, Nocardia asteroides, Pasteurella haemolytica, Pasteurella multocida, Proteus mirabilis, Proteus vulgaris, Pseudomonas aeruginosa, Pseudomonas putida, Pseudomonas syringae, Rickettsia rickettsii, Rochalimaea quintana, Salmonella bongori, Salmonella cholerasuis, Salmonella enterica, Salmonella paratyphi, Salmonella typhi, Salmonella typhimurium, Shigella boydii, Shigella dysenteriae, Shigella flexneri, Shigella sonnei, Staphylococcus aureus, Staphylococcus epidermidis, Staphylococcus haemolyticus, Streptococcus pneumoniae, Streptococcus mutans, Streptococcus pyogenes, Treponema pallidum, Ureaplasma urealyticum, Vibrio cholerae, Vibrio parahaemolyticus, Vibrio vulnificans, Yersinia enterocolitica, Yersinia pestis or any species falling within the genera of any of the above species.

[0774] In some embodiments of the present invention, the methods for the production of stabilized RNA, as described in U.S. patent application Ser. No. 10/327592, entitled STABILIZED NUCLEIC ACIDS IN GENE AND DRUG DISCOVERY AND METHODS OF USE, filed Dec. 20, 2002, the disclosure of which is incorporated herein by reference in its entirety, can be used in the above cell-based assays in Gram-negative organisms to extend the lifetime of transcripts corresponding to the nucleic acids described herein.

[0775] The cell-based assay described above may also be used to identify the biological pathway in which a proliferation-required nucleic acid or its gene product lies. In such methods, cells transcribing a sub-lethal level of antisense complementary to at least a portion of a proliferation-required operon which contains a target proliferation-required nucleic acid, and control cells in which transcription of the antisense has not been induced are contacted with a panel of antibiotics known to act in various pathways. If the antibiotic acts in the pathway in which the target proliferation-required nucleic acid or its gene product lies, cells in which transcription of the antisense has been induced will be more sensitive to the antibiotic than cells in which expression of the antisense has not been induced.

[0776] As a control, the results of the assay may be confirmed by contacting a panel of cells transcribing antisense nucleic acids to many different operons containing proliferation-required genes other than the target proliferation-required gene. If the antibiotic is acting specifically, heightened sensitivity to the antibiotic will be observed only in the cells transcribing antisense to an operon containing the target proliferation-required gene but will not be observed generally in all cells expressing antisense to proliferation-required genes.

[0777] Similarly, the above method may be used to determine the pathway on which a test compound, such as a test antibiotic acts. A panel of cells, each of which transcribes an antisense to at least a portion of a proliferation-required operon, which contains a proliferation-required nucleic acid in a known pathway, is contacted with a compound for which it is desired to determine the pathway on which it acts. The sensitivity of the panel of cells to the test compound is determined in cells in which transcription of the antisense has been induced and in control cells in which expression of the antisense has not been induced. If the test compound acts on the pathway on which an antisense nucleic acid acts, cells in which expression of the antisense has been induced will be more sensitive to the compound than cells in which expression of the antisense has not been induced. In addition, control cells in which expression of antisense to proliferation-required genes in other pathways has been induced will not exhibit heightened sensitivity to the compound. In this way, the pathway on which the test compound acts may be determined.

[0778] It will be appreciated that any of the cell-based assays described above may be implemented by providing an antisense nucleic acid complementary to at least a portion of an operon comprising a nucleotide sequence selected from the group consisting of SEQ ID NOs: 1-194, wherein the portion does not include a nucleotide sequence selected from the group consisting of SEQ ID NOs: 201-550 to Staphylococcus aureus or an organism selected from the group consisting of Acinetobacter baumannii, Anaplasma marginale, Bacillus anthracis, Bacteroides fragilis, Bordetella pertussis, Borrelia burgdorferi, Brucella abortus, Brucella melitensis, Burkholderia cepacia, Burkholderia fungorum, Burkholderia mallei, Campylobacter jejuni, Chlamydia pneumoniae, Chlamydia trachomatis, Clostridium acetobutylicum, Clostridium botulinum, Clostridium difficile, Clostridium perfringens, Corynebacterium diptheriae, Coxiella burnetii, Enterobacter cloacae, Enterococcus faecalis, Enterococcus faecium, Escherichia coli, Francisella tularensis, Haemophilus influenzae, Helicobacter pylori, Klebsiella pneumoniae, Legionella pneumophila, Listeria monocytogenes, Moraxella catarrhalis, Mycobacterium avium, Mycobacterium bovis, Mycobacterium leprae, Mycobacterium tuberculosis, Mycoplasma genitalium, Mycoplasma pneumoniae, Neisseria gonorrhoeae, Neisseria meningitidis, Nocardia asteroides, Pasteurella haemolytica, Pasteurella multocida, Proteus mirabilis, Proteus vulgaris, Pseudomonas aeruginosa, Pseudomonas putida, Pseudomonas syringae, Rickettsia rickettsii, Rochalimaea quintana, Salmonella bongori, Salmonella cholerasuis, Salmonella enterica, Salmonella paratyphi, Salmonella typhi, Salmonella typhimurium, Shigella boydii, Shigella dysenteriae, Shigella flexneri, Shigella sonnei, Staphylococcus aureus, Staphylococcus epidermidis, Staphylococcus haemolyticus, Streptococcus pneumoniae, Streptococcus mutans, Streptococcus pyogenes, Treponema pallidum, Ureaplasma urealyticum, Vibrio cholerae, Vibrio parahaemolyticus, Vibrio vulnificans, Yersinia enterocolitica, Yersinia pestis or any species falling within the genera of any of the above species.

[0779] It will also be appreciated that any of the cell-based assays described above may be implemented by providing an antisense nucleic acid complementary to at least a portion of a proliferation-required operon comprising a gene that is homologous to a proliferation-required gene having a nucleotide sequence selected from the group consisting of SEQ ID NOs: 201-550 or by providing an antisense nucleic acid complementary to at least a portion of a proliferation-required operon comprising a gene encoding a polypeptide that is homologous to a proliferation-required polypeptide having an amino acid sequence selected from the group consisting of SEQ ID NOs: 551-824 to an organism selected from the group consisting of Acinetobacter baumannii, Anaplasma marginale, Bacillus anthracis, Bacteroides fragilis, Bordetella pertussis, Borrelia burgdorferi, Brucella abortus, Brucella melitensis, Burkholderia cepacia, Burkholderia fungorum, Burkholderia mallei, Campylobacter jejuni, Chlamydia pneumoniae, Chlamydia trachomatis, Clostridium acetobutylicum, Clostridium botulinum, Clostridium difficile, Clostridium perfringens, Corynebacterium diptheriae, Coxiella burnetii, Enterobacter cloacae, Enterococcus faecalis, Enterococcus faecium, Escherichia coli, Francisella tularensis, Haemophilus influenzae, Helicobacter pylori, Klebsiella pneumoniae, Legionella pneumophila, Listeria monocytogenes, Moraxella catarrhalis, Mycobacterium avium, Mycobacterium bovis, Mycobacterium leprae, Mycobacterium tuberculosis, Mycoplasma genitalium, Mycoplasma pneumoniae, Neisseria gonorrhoeae, Neisseria meningitidis, Nocardia asteroides, Pasteurella haemolytica, Pasteurella multocida, Proteus mirabilis, Proteus vulgaris, Pseudomonas aeruginosa, Pseudomonas putida, Pseudomonas syringae, Rickettsia rickettsii, Rochalimaea quintana, Salmonella bongori, Salmonella cholerasuis, Salmonella enterica, Salmonella paratyphi, Salmonella typhi, Salmonella typhimurium, Shigella boydii, Shigella dysenteriae, Shigella flexneri, Shigella sonnei, Staphylococcus aureus, Staphylococcus epidermidis, Staphylococcus haemolyticus, Streptococcus pneumoniae, Streptococcus mutans, Streptococcus pyogenes, Treponema pallidum, Ureaplasma urealyticum, Vibrio cholerae, Vibrio parahaemolyticus, Vibrio vulnificans, Yersinia enterocolitica, Yersinia pestis or any species falling within the genera of any of the above species.

[0780] It will also be appreciated that any of the cell-based assays described above may be implemented by providing an antisense nucleic acid complementary to at least a portion of a proliferation-required operon, which has been identified by the methods described herein, to an organism selected from the group consisting of Acinetobacter baumannii, Anaplasma marginale, Bacillus anthracis, Bacteroides fragilis, Bordetella pertussis, Borrelia burgdorferi, Brucella abortus, Brucella melitensis, Burkholderia cepacia, Burkholderia fungorum, Burkholderia mallei, Campylobacter jejuni, Chlamydia pneumoniae, Chlamydia trachomatis, Clostridium acetobutylicum, Clostridium botulinum, Clostridium difficile, Clostridium perfringens, Corynebacterium diptheriae, Coxiella burnetii, Enterobacter cloacae, Enterococcus faecalis, Enterococcus faecium, Escherichia coli, Francisella tularensis, Haemophilus influenzae, Helicobacter pylori, Klebsiella pneumoniae, Legionella pneumophila, Listeria monocytogenes, Moraxella catarrhalis, Mycobacterium avium, Mycobacterium bovis, Mycobacterium leprae, Mycobacterium tuberculosis, Mycoplasma genitalium, Mycoplasma pneumoniae, Neisseria gonorrhoeae, Neisseria meningitidis, Nocardia asteroides, Pasteurella haemolytica, Pasteurella multocida, Proteus mirabilis, Proteus vulgaris, Pseudomonas aeruginosa, Pseudomonas putida, Pseudomonas syringae, Rickettsia rickettsii, Rochalimaea quintana, Salmonella bongori, Salmonella cholerasuis, Salmonella enterica, Salmonella paratyphi, Salmonella typhi, Salmonella typhimurium, Shigella boydii, Shigella dysenteriae, Shigella flexneri, Shigella sonnei, Staphylococcus aureus, Staphylococcus epidermidis, Staphylococcus haemolyticus, Streptococcus pneumoniae, Streptococcus mutans, Streptococcus pyogenes, Treponema pallidum, Ureaplasma urealyticum, Vibrio cholerae, Vibrio parahaemolyticus, Vibrio vulnificans, Yersinia enterocolitica, Yersinia pestis or any species falling within the genera of any of the above species.

[0781] In some embodiments of the present invention, the methods for the production of stabilized RNA, as described in U.S. patent application Ser. No. 10/327592, entitled STABILIZED NUCLEIC ACIDS IN GENE AND DRUG DISCOVERY AND METHODS OF USE, filed Dec. 20, 2002, the disclosure of which is incorporated herein by reference in its entirety, can be used in the above cell-based assays in Gram-negative organisms to extend the lifetime of transcripts corresponding to the nucleic acids described herein.

[0782] The Example below provides one method for performing assays to identify the pathway in which a proliferation-required gene lie or the pathway on which an antibiotic acts.

### Example 15

### Identification of the Pathway in which a Proliferation-Required Gene Lies or the Pathway on which an Antibiotic Acts

[0783] A. Preparation of Bacterial Stocks for Assay

[0784] To provide a consistent source of cells to screen, frozen stocks of host bacteria containing the desired antisense construct are prepared using standard microbiological techniques. For example, a single clone of the microorganism can be isolated by streaking out a sample of the original stock onto an agar plate containing nutrients for cell growth and an antibiotic for which the antisense construct contains a selectable marker which confers resistance. After overnight growth an isolated colony is picked from the plate with a sterile needle and transferred to an appropriate liquid growth medium containing the antibiotic required for maintenance of the plasmid. The cells are incubated at 30° C. to 37° C. with vigorous shaking for 4 to 6 hours to yield a culture in exponential growth. Sterile glycerol is added to 15% (volume to volume) and 100 μL to 500 μL aliquots are distributed into sterile cryotubes, snap frozen in liquid nitrogen, and stored at −80° C. for future assays.

[0785] B. Growth of Bacteria for Use in the Assay

[0786] A day prior to an assay, a stock vial is removed from the freezer, rapidly thawed (37° C. water bath) and a loop of culture is streaked out on an agar plate containing nutrients for cell growth and an antibiotic to which the selectable marker of the antisense construct confers resistance. After overnight growth at 37° C., ten randomly chosen, isolated colonies are transferred from the plate (sterile inoculum loop) to a sterile tube containing 5 mL of LB medium containing the antibiotic to which the antisense vector confers resistance. After vigorous mixing to form a homogeneous cell suspension, the optical density of the suspension is measured at 600 nm (OD₆₀₀) and if necessary an aliquot of the suspension is diluted into a second tube of 5 mL, sterile, LB medium plus antibiotic to achieve an OD₆₀₀≦0.02 absorbance units. The culture is then incubated at 37° C. for 1-2 hrs with shaking until the OD₆₀₀ reaches OD 0.2 -0.3. At this point the cells are ready to be used in the assay.

[0787] C. Selection of Media to be Used in Assay

[0788] Two-fold dilution series of the inducer are generated in culture media containing the appropriate antibiotic for maintenance of the antisense construct. Several media are tested side by side and three to four wells are used to evaluate the effects of the inducer at each concentration in each media. For example, LB broth, TBD broth and Muller-Hinton media may be tested with the inducer xylose at the following concentrations, 5 mM, 10 mM, 20 mM, 40 mM, 80 mM, 120 mM and 160 mM. Equal volumes of test media-inducer and cells are added to the wells of a 384 well microtiter plate and mixed. The cells are prepared as described above and diluted 1:100 in the appropriate media containing the test antibiotic immediately prior to addition to the microtiter plate wells. For a control, cells are also added to several wells of each media that do not contain inducer, for example 0 mM xylose. Cell growth is monitored continuously by incubation at 37° C. in a microtiter plate reader monitoring the OD₆₀₀ of the wells over an 18-hour period. The percent inhibition of growth produced by each concentration of inducer is calculated by comparing the rates of logarithmic growth against that exhibited by cells growing in medium without inducer. The medium yielding greatest sensitivity to inducer is selected for use in the assays described below.

[0789] D. Measurement of Test Antibiotic Sensitivity in the Absence of Antisense Construct Induction

[0790] Two-fold dilution series of antibiotics of known mechanism of action are generated in the culture medium selected for further assay development that has been supplemented with the antibiotic used to maintain the construct. A panel of test antibiotics known to act on different pathways is tested side by side with three to four wells being used to evaluate the effect of a test antibiotic on cell growth at each concentration. Equal volumes of test antibiotic and cells are added to the wells of a 384 well microtiter plate and mixed. Cells are prepared as described above using the medium selected for assay development supplemented with the antibiotic required to maintain the antisense construct and are diluted 1:100 in identical medium immediately prior to addition to the microtiter plate wells. For a control, cells are also added to several wells that lack antibiotic, but contain the solvent used to dissolve the antibiotics. Cell growth is monitored continuously by incubation at 37° C. in a microtiter plate reader monitoring the OD₆₀₀ of the wells over an 18-hour period. The percent inhibition of growth produced by each concentration of antibiotic is calculated by comparing the rates of logarithmic growth against that exhibited by cells growing in medium without antibiotic. A plot of percent inhibition against log[antibiotic concentration] allows extrapolation of an IC₅₀ value for each antibiotic.

[0791] E. Measurement of Test Antibiotic Sensitivity in the Presence of Antisense Construct Inducer

[0792] The culture medium selected for use in the assay is supplemented with inducer at concentrations shown to inhibit cell growth by 50% and 80% as described above, as well as the antibiotic used to maintain the construct. Two-fold dilution series of the panel of test antibiotics used above are generated in each of these media. Several antibiotics are tested side by side in each medium with three to four wells being used to evaluate the effects of an antibiotic on cell growth at each concentration. Equal volumes of test antibiotic and cells are added to the wells of a 384 well microtiter plate and mixed. Cells are prepared as described above using the medium selected for use in the assay supplemented with the antibiotic required to maintain the antisense construct. The cells are diluted 1:100 into two 50 mL aliquots of identical medium containing concentrations of inducer that have been shown to inhibit cell growth by 50% and 80% respectively and incubated at 37° C. with shaking for 2.5 hours. Immediately prior to addition to the microtiter plate wells, the cultures are adjusted to an appropriate OD₆₀₀ (typically 0.002) by dilution into warm (37° C.) sterile medium supplemented with identical concentrations of the inducer and antibiotic used to maintain the antisense construct. For a control, cells are also added to several wells that contain solvent used to dissolve test antibiotics but which contain no antibiotic. Cell growth is monitored continuously by incubation at 37° C. in a microtiter plate reader monitoring the OD₆₀₀ of the wells over an 18-hour period. The percent inhibition of growth produced by each concentration of antibiotic is calculated by comparing the rates of logarithmic growth against that exhibited by cells growing in medium without antibiotic. A plot of percent inhibition against log[antibiotic concentration] allows extrapolation of an IC₅₀ value for each antibiotic.

[0793] F. Determining the Specificity of the Test Antibiotics

[0794] A comparison of the IC₅₀s generated by antibiotics of known mechanism of action under antisense induced and non-induced conditions allows the pathway in which a proliferation-required nucleic acid lies to be identified. If cells, which express an antisense nucleic acid comprising a nucleotide sequence complementary to at least a portion of an operon comprising the proliferation-required gene, are selectively sensitive to an antibiotic acting via a particular pathway, then the gene contained on the operon against which the antisense acts is involved in the pathway on which the antibiotic acts.

[0795] G. Identification of Pathway in which a Test Antibiotic Acts

[0796] As discussed above, the cell-based assay may also be used to determine the pathway against which a test antibiotic acts. In such an analysis, the pathways against which each member of a panel of antisense nucleic acids acts are identified as described above. A panel of cells, each containing an inducible vector which transcribes an antisense nucleic acid comprising a nucleotide sequence complementary to at least a portion of an operon comprising a proliferation-required gene in a known proliferation-required pathway, is contacted with a test antibiotic for which it is desired to determine the pathway on which it acts under inducing and non-inducing conditions. If heightened sensitivity is observed in induced cells transcribing antisense complementary to at least a portion of an operon comprising a proliferation-required gene in a particular pathway but not in induced cells transcribing antisense nucleic acids comprising nucleotide sequences complementary to at least a portion of an operon comprising a gene involved in other pathways, then the test antibiotic acts against the pathway for which heightened sensitivity was observed.

[0797] One skilled in the art will appreciate that further optimization of the assay conditions, such as the concentration of inducer used to induce antisense transcription and/or the growth conditions used for the assay (for example incubation temperature and medium components) may further increase the selectivity and/or magnitude of the antibiotic sensitization exhibited.

[0798] It will be appreciated that the cell-based assays described above may be implemented by providing an antisense nucleic acid complementary to at least a portion of an operon comprising a nucleotide sequence selected from the group consisting of SEQ ID NOs: 1-194, wherein the portion does not include a nucleotide sequence selected from the group consisting of SEQ ID NOs: 201-550 to Staphylococcus aureus or an organism selected from the group consisting of Acinetobacter baumannii, Anaplasma marginale, Bacillus anthracis, Bacteroides fragilis, Bordetella pertussis, Borrelia burgdorferi, Brucella abortus, Brucella melitensis, Burkholderia cepacia, Burkholderia fungorum, Burkholderia mallei, Campylobacter jejuni, Chlamydia pneumoniae, Chlamydia trachomatis, Clostridium acetobutylicum, Clostridium botulinum, Clostridium difficile, Clostridium perfringens, Corynebacterium diptheriae, Coxiella burnetii, Enterobacter cloacae, Enterococcus faecalis, Enterococcus faecium, Escherichia coli, Francisella tularensis, Haemophilus influenzae, Helicobacter pylori, Klebsiella pneumoniae, Legionella pneumophila, Listeria monocytogenes, Moraxella catarrhalis, Mycobacterium avium, Mycobacterium bovis, Mycobacterium leprae, Mycobacterium tuberculosis, Mycoplasma genitalium, Mycoplasma pneumoniae, Neisseria gonorrhoeae, Neisseria meningitidis, Nocardia asteroides, Pasteurella haemolytica, Pasteurella multocida, Proteus mirabilis, Proteus vulgaris, Pseudomonas aeruginosa, Pseudomonas putida, Pseudomonas syringae, Rickettsia rickettsii, Rochalimaea quintana, Salmonella bongori, Salmonella cholerasuis, Salmonella enterica, Salmonella paratyphi, Salmonella typhi, Salmonella typhimurium, Shigella boydii, Shigella dysenteriae, Shigella flexneri, Shigella sonnei, Staphylococcus aureus, Staphylococcus epidermidis, Staphylococcus haemolyticus, Streptococcus pneumoniae, Streptococcus mutans, Streptococcus pyogenes, Treponema pallidum, Ureaplasma urealyticum, Vibrio cholerae, Vibrio parahaemolyticus, Vibrio vulnificans, Yersinia enterocolitica, Yersinia pestis or any species falling within the genera of any of the above species.

[0799] It will also be appreciated that the cell-based assays described above may be implemented by providing an antisense nucleic acid complementary to at least a portion of a proliferation-required operon comprising a gene that is homologous to a proliferation-required gene having a nucleotide sequence selected from the group consisting of SEQ ID NOs: 201-550 or by providing an antisense nucleic acid complementary to at least a portion of a proliferation-required operon comprising a gene encoding a polypeptide that is homologous to a proliferation-required polypeptide having an amino acid sequence selected from the group consisting of SEQ ID NOs: 551-824 to an organism selected from the group consisting of Acinetobacter baumannii, Anaplasma marginale, Bacillus anthracis, Bacteroides fragilis, Bordetella pertussis, Borrelia burgdorferi, Brucella abortus, Brucella melitensis, Burkholderia cepacia, Burkholderia fungorum, Burkholderia mallei, Campylobacter jejuni, Chlamydia pneumoniae, Chlamydia trachomatis, Clostridium acetobutylicum, Clostridium botulinum, Clostridium difficile, Clostridium perfringens, Corynebacterium diptheriae, Coxiella burnetii, Enterobacter cloacae, Enterococcus faecalis, Enterococcus faecium, Escherichia coli, Francisella tularensis, Haemophilus influenzae, Helicobacter pylori, Klebsiella pneumoniae, Legionella pneumophila, Listeria monocytogenes, Moraxella catarrhalis, Mycobacterium avium, Mycobacterium bovis, Mycobacterium leprae, Mycobacterium tuberculosis, Mycoplasma genitalium, Mycoplasma pneumoniae, Neisseria gonorrhoeae, Neisseria meningitidis, Nocardia asteroides, Pasteurella haemolytica, Pasteurella multocida, Proteus mirabilis, Proteus vulgaris, Pseudomonas aeruginosa, Pseudomonas putida, Pseudomonas syringae, Rickettsia rickettsii, Rochalimaea quintana, Salmonella bongori, Salmonella cholerasuis, Salmonella enterica, Salmonella paratyphi, Salmonella typhi, Salmonella typhimurium, Shigella boydii, Shigella dysenteriae, Shigellaflexneri, Shigella sonnei, Staphylococcus aureus, Staphylococcus epidermidis, Staphylococcus haemolyticus, Streptococcus pneumoniae, Streptococcus mutans, Streptococcus pyogenes, Treponema pallidum, Ureaplasma urealyticum, Vibrio cholerae, Vibrio parahaemolyticus, Vibrio vulnificans, Yersinia enterocolitica, Yersinia pestis or any species falling within the genera of any of the above species.

[0800] It will also be appreciated that the cell-based assays described above may be implemented by providing an antisense nucleic acid complementary to at least a portion of a proliferation-required operon, which has been identified by the methods described herein, to an organism selected from the group consisting of Acinetobacter baumannii, Anaplasma marginale, Bacillus anthracis, Bacteroides fragilis, Bordetella pertussis, Borrelia burgdorferi, Brucella abortus, Brucella melitensis, Burkholderia cepacia, Burkholderia fungorum, Burkholderia mallei, Campylobacter jejuni, Chlamydia pneumoniae, Chlamydia trachomatis, Clostridium acetobutylicum, Clostridium botulinum, Clostridium difficile, Clostridium perfringens, Corynebacterium diptheriae, Coxiella burnetii, Enterobacter cloacae, Enterococcus faecalis, Enterococcus faecium, Escherichia coli, Francisella tularensis, Haemophilus influenzae, Helicobacter pylori, Klebsiella pneumoniae, Legionella pneumophila, Listeria monocytogenes, Moraxella catarrhalis, Mycobacterium avium, Mycobacterium bovis, Mycobacterium leprae, Mycobacterium tuberculosis, Mycoplasma genitalium, Mycoplasma pneumoniae, Neisseria gonorrhoeae, Neisseria meningitidis, Nocardia asteroides, Pasteurella haemolytica, Pasteurella multocida, Proteus mirabilis, Proteus vulgaris, Pseudomonas aeruginosa, Pseudomonas putida, Pseudomonas syringae, Rickettsia rickettsii, Rochalimaea quintana, Salmonella bongori, Salmonella cholerasuis, Salmonella enterica, Salmonella paratyphi, Salmonella typhi, Salmonella typhimurium, Shigella boydii, Shigella dysenteriae, Shigellaflexneri, Shigella sonnei, Staphylococcus aureus, Staphylococcus epidermidis, Staphylococcus haemolyticus, Streptococcus pneumoniae, Streptococcus mutans, Streptococcus pyogenes, Treponema pallidum, Ureaplasma urealyticum, Vibrio cholerae, Vibrio parahaemolyticus, Vibrio vulnificans, Yersinia enterocolitica, Yersinia pestis or any species falling within the genera of any of the above species.

[0801] In some embodiments of the present invention, the methods for the production of stabilized RNA, as described in U.S. patent application Ser. No. 10/327592, entitled STABILIZED NUCLEIC ACIDS IN GENE AND DRUG DISCOVERY AND METHODS OF USE, filed Dec. 20, 2002, the disclosure of which is incorporated herein by reference in its entirety, can be used in the above cell-based assays in Gram-negative organisms to extend the lifetime of transcripts corresponding to the nucleic acids described herein.

[0802] The following example confirms the effectiveness of the methods described above.

### Example 16

### Identification of the Biological Pathway in which a Proliferation-Required Gene Lies

[0803] The effectiveness of the above assays was validated using proliferation-required genes from E. coli which were identified using procedures similar to those described above. Antibiotics of various chemical classes and modes of action were purchased from Sigma Chemicals (St. Louis, Mo.). Stock solutions were prepared by dissolving each antibiotic in an appropriate aqueous solution based on information provided by the manufacturer. The final working solution of each antibiotic contained no more than 0.2% (w/v) of any organic solvent. To determine their potency against a bacterial strain engineered for transcription of an antisense comprising a nucleotide sequence complementary to a proliferation-required 50S ribosomal protein, each antibiotic was serially diluted two- or three- fold in growth medium supplemented with the appropriate antibiotic for maintenance of the antisense construct. At least ten dilutions were prepared for each antibiotic. 25 μL aliquots of each dilution were transferred to discrete wells of a 384-well microplate (the assay plate) using a multi-channel pipette. Quadruplicate wells were used for each dilution of an antibiotic under each treatment condition (plus and minus inducer). Each assay plate contained twenty wells for cell growth controls (growth medium replacing antibiotic), ten wells for each treatment (plus and minus inducer, in this example IPTG). Assay plates were usually divided into the two treatments: half the plate containing induced cells and an appropriate concentrations of inducer (in this example IPTG) to maintain the state of induction, the other half containing non-induced cells in the absence of IPTG.

[0804] Cells for the assay were prepared as follows. Bacterial cells containing a construct, from which transcription of antisense nucleic acid comprising a nucleotide sequence complementary to rplL and rplJ (AS-rplL/J), which encode proliferation-required 50S ribosomal subunit proteins, is inducible in the presence of IPTG, were grown into exponential growth (OD₆₀₀ 0.2 to 0.3) and then diluted 1:100 into fresh medium containing either 400 μM or 0 μM inducer (IPTG). These cultures were incubated at 37° C. for 2.5 hr. After a 2.5 hr incubation, induced and non-induced cells were respectively diluted into an assay medium at a final OD₆₀₀ value of 0.0004. The medium contained an appropriate concentration of the antibiotic for the maintenance of the antisense construct. In addition, the medium used to dilute induced cells was supplemented with 800 μM IPTG so that addition to the assay plate would result in a final IPTG concentration of 400 μM. Induced and non-induced cell suspensions were dispensed (25 μl/well) into the appropriate wells of the assay plate as discussed previously. The plate was then loaded into a plate reader, incubated at constant temperature, and cell growth was monitored in each well by the measurement of light scattering at 595 nm. Growth was monitored every 5 minutes until the cell culture attained a stationary growth phase. For each concentration of antibiotic, a percentage inhibition of growth was calculated at the time point corresponding to mid-exponential growth for the associated control wells (no antibiotic, plus or minus IPTG). For each antibiotic and condition (plus or minus IPTG), a plot of percent inhibition versus log of antibiotic concentration was generated and the IC₅₀ determined. A comparison of the IC₅₀ for each antibiotic in the presence and absence of IPTG revealed whether induction of the antisense construct sensitized the cell to the mechanism of action exhibited by the antibiotic. Cells which exhibited a statistically significant decrease in the IC₅₀ value in the presence of inducer were considered to have an increased sensitivity to the test antibiotic.

[0805] The results are provided in Table VIII below, which lists the classes and names of the antibiotics used in the analysis, the targets of the antibiotics, the IC₅₀ in the absence of IPTG, the IC₅₀ in the presence of IPTG, the concentration units for the IC₅₀ₛ, the fold increase in IC₅₀ in the presence of IPTG, and whether increased sensitivity was observed in the presence of IPTG.

TABLE VIII
Effect of Expression of Antisense RNA to rplL and rplJ on Antibiotic Sensitivity

| | | | | | | |
|---|---|---|---|---|---|---|
| | | | | | Fold | |
| | | IC₅₀ | IC₅₀ | Conc. | Increase in | Sensitivity |
| ANTIBIOTIC CLASS/Names | TARGET | (−IPTG) | (+IPTG) | Unit | Sensitivity | Increased? |

PROTEIN SYNTHESIS INHIBITOR
AMINOGLYCOSIDES

| | | | | | | |
|---|---|---|---|---|---|---|
| Gentamicin | 30S ribosome function | 2715 | 19.19 | ng/ml | 141 | Yes |
| Streptomycin | 30S ribosome function | 11280 | 161 | ng/ml | 70 | Yes |
| Spectinomycin | 30S ribosome function | 18050 | <156 | ng/ml | | Yes |
| Tobramycin | 30S ribosome function | 3594 | 70.58 | ng/ml | 51 | Yes |

MACROLIDES

| | | | | | | |
|---|---|---|---|---|---|---|
| Erythromycin | 50S ribosome function | 7467 | 187 | ng/ml | 40 | Yes |

AROMATIC POYKETIDES

| | | | | | | |
|---|---|---|---|---|---|---|
| Tetracycline | 30S ribosome function | 199.7 | 1.83 | ng/ml | 109 | Yes |
| Minocycline | 30S ribosome function | 668.4 | 3.897 | ng/ml | 172 | Yes |
| Doxycycline | 30S ribosome function | 413.1 | 27.81 | ng/ml | 15 | Yes |

OTHER PROTEIN SYNTHESIS INHIBITORS

| | | | | | | |
|---|---|---|---|---|---|---|
| Fusidic acid | Elongation Factor G function | 59990 | 641 | ng/ml | 94 | Yes |
| Chloramphenicol | 30S ribosome function | 465.4 | 1.516 | ng/ml | 307 | Yes |
| Lincomycin | 50S ribosome function | 47150 | 324.2 | ng/ml | 145 | Yes |

OTHER ANTIBIOTIC MECHANISMS
B-LACTAMS

| | | | | | | |
|---|---|---|---|---|---|---|
| Cefoxitin | Cell wall biosynthesis | 2782 | 2484 | ng/ml | 1 | No |
| Cefotaxime | Cell wall biosynthesis | 24.3 | 24.16 | ng/ml | 1 | No |

DNA SYNTHESIS INHIBITORS

| | | | | | | |
|---|---|---|---|---|---|---|
| Nalidixic acid | DNA Gyrase activity | 6973 | 6025 | ng/ml | 1 | No |
| Ofloxacin | DNA Gyrase activity | 49.61 | 45.89 | ng/ml | 1 | No |

OTHER

| | | | | | | |
|---|---|---|---|---|---|---|
| Bacitracin | Cell membrane function | 4077 | 4677 | mg/ml | 1 | No |
| Trimethoprim | Dihydrofolate Reductase | 128.9 | 181.97 | ng/ml | 1 | No |
| | activity | | | | | |
| Vancomycin | Cell wall biosynthesis | 145400 | 72550 | ng/ml | 2 | No |

[0806] The above results demonstrate that induction of an antisense RNA complementary to genes encoding 50S ribosomal subunit proteins results in a selective and highly significant sensitization of cells to antibiotics that inhibit ribosomal function and protein synthesis. The above results further demonstrate that induction of an antisense to an essential gene sensitizes a cell or microorganism to compounds that interfere with that gene product's biological role. This sensitization is restricted to compounds that interfere with pathways associated with the targeted gene and its product.

[0807] It will be appreciated that the cell-based assays described above may be implemented by providing an antisense nucleic acid complementary to at least a portion of an operon comprising a nucleotide sequence selected from the group consisting of SEQ ID NOs: 1-194, wherein the portion does not include a nucleotide sequence selected from the group consisting of SEQ ID NOs: 201-550 to Staphylococcus aureus or an organism selected from the group consisting of Acinetobacter baumannii, Anaplasma marginale, Bacillus anthracis, Bacteroides fragilis, Bordetella pertussis, Borrelia burgdorferi, Brucella abortus, Brucella melitensis, Burkholderia cepacia, Burkholderia fungorum, Burkholderia mallei, Campylobacter jejuni, Chlamydia pneumoniae, Chlamydia trachomatis, Clostridium acetobutylicum, Clostridium botulinum, Clostridium difficile, Clostridium perfringens, Corynebacterium diptheriae, Coxiella burnetii, Enterobacter cloacae, Enterococcus faecalis, Enterococcus faecium, Escherichia coli, Francisella tularensis, Haemophilus influenzae, Helicobacter pylori, Klebsiella pneumoniae, Legionella pneumophila, Listeria monocytogenes, Moraxella catarrhalis, Mycobacterium avium, Mycobacterium bovis, Mycobacterium leprae, Mycobacterium tuberculosis, Mycoplasma genitalium, Mycoplasma pneumoniae, Neisseria gonorrhoeae, Neisseria meningitidis, Nocardia asteroides, Pasteurella haemolytica, Pasteurella multocida, Proteus mirabilis, Proteus vulgaris, Pseudomonas aeruginosa, Pseudomonas putida, Pseudomonas syringae, Rickettsia rickettsi, Rochalimaea quintana, Salmonella bongori, Salmonella cholerasuis, Salmonella enterica, Salmonella paratyphi, Salmonella typhi, Salmonella typhimurium, Shigella boydii, Shigella dysenteriae, Shigellaflexneri, Shigella sonnei, Staphylococcus aureus, Staphylococcus epidermidis, Staphylococcus haemolyticus, Streptococcus pneumoniae, Streptococcus mutans, Streptococcus pyogenes, Treponema pallidum, Ureaplasma urealyticum, Vibrio cholerae, Vibrio parahaemolyticus, Vibrio vulnificans, Yersinia enterocolitica, Yersinia pestis or any species falling within the genera of any of the above species.

[0808] It will also be appreciated that the cell-based assays described above may be implemented by providing an antisense nucleic acid complementary to at least a portion of a proliferation-required operon comprising a gene that is homologous to a proliferation-required gene having a nucleotide sequence selected from the group consisting of SEQ ID NOs: 201-550 or by providing an antisense nucleic acid complementary to at least a portion of a proliferation-required operon comprising a gene encoding a polypeptide that is homologous to a proliferation-required polypeptide having an amino acid sequence selected from the group consisting of SEQ ID NOs: 551-824 to an organism selected from the group consisting of Acinetobacter baumannii, Anaplasma marginale, Bacillus anthracis, Bacteroides fragilis, Bordetella pertussis, Borrelia burgdorferi, Brucella abortus, Brucella melitensis, Burkholderia cepacia, Burkholderia fungorum, Burkholderia mallei, Campylobacter jejuni, Chlamydia pneumoniae, Chlamydia trachomatis, Clostridium acetobutylicum, Clostridium botulinum, Clostridium difficile, Clostridium perfringens, Corynebacterium diptheriae, Coxiella burnetii, Enterobacter cloacae, Enterococcus faecalis, Enterococcus faecium, Escherichia coli, Francisella tularensis, Haemophilus influenzae, Helicobacter pylori, Klebsiella pneumoniae, Legionella pneumophila, Listeria monocytogenes, Moraxella catarrhalis, Mycobacterium avium, Mycobacterium bovis, Mycobacterium leprae, Mycobacterium tuberculosis, Mycoplasma genitalium, Mycoplasma pneumoniae, Neisseria gonorrhoeae, Neisseria meningitidis, Nocardia asteroides, Pasteurella haemolytica, Pasteurella multocida, Proteus mirabilis, Proteus vulgaris, Pseudomonas aeruginosa, Pseudomonas putida, Pseudomonas syringae, Rickettsia rickettshi, Rochalimaea quintana, Salmonella bongori, Salmonella cholerasuis, Salmonella enterica, Salmonella paratyphi, Salmonella typhi, Salmonella typhimurium, Shigella boydii, Shigella dysenteriae, Shigellaflexneri, Shigella sonnei, Staphylococcus aureus, Staphylococcus epidermidis, Staphylococcus haemolyticus, Streptococcus pneumoniae, Streptococcus mutans, Streptococcus pyogenes, Treponema pallidum, Ureaplasma urealyticum, Vibrio cholerae, Vibrio parahaemolyticus, Vibrio vulnificans, Yersinia enterocolitica, Yersinia pestis or any species falling within the genera of any of the above species.

[0809] It will also be appreciated that the cell-based assays described above may be implemented by providing an antisense nucleic acid complementary to at least a portion of a proliferation-required operon, which has been identified by the methods described herein, to an organism selected from the group consisting of Acinetobacter baumannii, Anaplasma marginale, Bacillus anthracis, Bacteroides fragilis, Bordetella pertussis, Borrelia burgdorferi, Brucella abortus, Brucella melitensis, Burkholderia cepacia, Burkholderia fungorum, Burkholderia mallei, Campylobacter jejuni, Chlamydia pneumoniae, Chlamydia trachomatis, Clostridium acetobutylicum, Clostridium botulinum, Clostridium difficile, Clostridium perfringens, Corynebacterium diptheriae, Coxiella burnetii, Enterobacter cloacae, Enterococcus faecalis, Enterococcus faecium, Escherichia coli, Francisella tularensis, Haemophilus influenzae, Helicobacter pylori, Klebsiella pneumoniae, Legionella pneumophila, Listeria monocytogenes, Moraxella catarrhalis, Mycobacterium avium, Mycobacterium bovis, Mycobacterium leprae, Mycobacterium tuberculosis, Mycoplasma genitalium, Mycoplasma pneumoniae, Neisseria gonorrhoeae, Neisseria meningitidis, Nocardia asteroides, Pasteurella haemolytica, Pasteurella multocida, Proteus mirabilis, Proteus vulgaris, Pseudomonas aeruginosa, Pseudomonas putida, Pseudomonas syringae, Rickettsia rickettsii, Rochalimaea quintana, Salmonella bongori, Salmonella cholerasuis, Salmonella enterica, Salmonella paratyphi, Salmonella typhi, Salmonella typhimurium, Shigella boydii, Shigella dysenteriae, Shigellaflexneri, Shigella sonnei, Staphylococcus aureus, Staphylococcus epidermidis, Staphylococcus haemolyticus, Streptococcus pneumoniae, Streptococcus mutans, Streptococcus pyogenes, Treponema pallidum, Ureaplasma urealyticum, Vibrio cholerae, Vibrio parahaemolyticus, Vibrio vulnificans, Yersinia enterocolitica, Yersinia pestis or any species falling within the genera of any of the above species.

[0810] In some embodiments of the present invention, the methods for the production of stabilized RNA, as described in U.S. patent application Ser. No. 10/327592, entitled STABILIZED NUCLEIC ACIDS IN GENE AND DRUG DISCOVERY AND METHODS OF USE, filed Dec. 20, 2002, the disclosure of which is incorporated herein by reference in its entirety, can be used in the above cell-based assays in Gram-negative organisms to extend the lifetime of transcripts corresponding to the nucleic acids described herein.

[0811] The example below describes an analysis performed in Staphylococcus aureus.

### Example 17

### Identification of the Biological Pathway in which a Gene Required for Proliferation of Staphylococcus aureus Lies

[0812] Antibiotics of various chemical classes and modes of action were purchased from chemical suppliers, for example Sigma Chemicals (St. Louis, Mo). Stock solutions were prepared by dissolving each antibiotic in an appropriate aqueous solution based on information provided by the manufacturer. The final working solution of each antibiotic contained no more than 0.2% (w/v) of any organic solvent.

[0813] To determine its potency against a bacterial strain containing an antisense nucleic acid comprising a nucleotide sequence complementary to the nucleotide sequence encoding the Beta subunit of DNA gyrase (which is required for proliferation) under the control of a xylose inducible promoter, each antibiotic was serially diluted two- or three- fold in growth medium supplemented with the appropriate antibiotic for maintenance of the antisense construct. At least ten dilutions were prepared for each antibiotic.

[0814] Aliquots (25 μL) of each dilution were transferred to discrete wells of a 384-well microplate (the assay plate) using a multi-channel pipette. Quadruplicate wells were used for each dilution of an antibiotic under each treatment condition (plus and minus inducer). Each assay plate contained twenty wells for cell growth controls (growth medium, no antibiotic), ten wells for each treatment (plus and minus inducer, xylose, in this example). Half the assay plate contained induced cells (in this example Staphylococcus aureus cells) and appropriate concentrations of inducer (xylose, in this example) to maintain the state of induction while the other half of the assay plate contained non-induced cells maintained in the absence of inducer.

[0815] Preparation of Bacterial Cells

[0816] Cells of a bacterial clone containing a construct in which transcription of antisense comprising a nucleotide sequence complementary to the sequence encoding the Beta subunit of DNA gyrase under the control of the xylose inducible promoter (S1M10000001F08) were grown into exponential growth (OD₆₀₀ 0.2 to 0.3) and then diluted 1:100 into fresh medium containing either 12 mM or 0 mM inducer (xylose). These cultures were incubated at 37° C. for 2.5 hr. The presence of inducer (xylose) in the medium initiates and maintains production of antisense RNA from the antisense construct. After a 2.5 hr incubation, induced and non-induced cells were respectively diluted into an assay medium containing an appropriate concentration of the antibiotic for the maintenance of the antisense construct. In addition, medium used to dilute induced cells was supplemented with 24 mM xylose so that addition to the assay plate would result in a final xylose concentration of 12 mM. The cells were diluted to a final OD₆₀₀ value of 0.0004.

[0817] Induced and non-induced cell suspensions were dispensed (25 μl/well) into the appropriate wells of the assay plate as discussed previously. The plate was then loaded into a plate reader and incubated at constant temperature while cell growth was monitored in each well by the measurement of light scattering at 595 nm. Growth was monitored every 5 minutes until the cell culture attained a stationary growth phase. For each concentration of antibiotic, a percentage inhibition of growth was calculated at the time point corresponding to mid-exponential growth for the associated control wells (no antibiotic, plus or minus xylose). For each antibiotic and condition (plus or minus xylose), plots of percent inhibition versus Log of antibiotic concentration were generated and IC₅₀ₛ, determined.

[0818] A comparison of each antibiotic's IC₅₀ in the presence and absence of inducer (xylose, in this example) reveals whether induction of the antisense construct sensitized the cell to the antibiotic's mechanism of action. If the antibiotic acts against the β subunit of DNA gyrase, the IC₅₀ of induced cells will be significantly lower than the IC₅₀ of uninduced cells.

[0819] FIG. 10 lists the antibiotics tested, their targets, and their fold increase in potency between induced cells and uninduced cells. As illustrated in FIG. 10, the potency of cefotaxime, cefoxitin, fusidic acid, lincomycin, tobramycin, trimethoprim and vancomycin, each of which act on targets other than the β subunit of gyrase, was not significantly different in induced cells as compared to uninduced cells. However, the potency of novobiocin, which is known to act against the Beta subunit of DNA gyrase, was significantly different between induced cells and uninduced cells.

[0820] Thus, induction of an antisense nucleic acid comprising a nucleotide sequence complementary to the sequence encoding the, subunit of gyrase results in a selective and significant sensitization of Staphylococcus aureus cells to an antibiotic which inhibits the activity of this protein. Furthermore, the results demonstrate that induction of an antisense construct to an essential gene sensitizes a cell or microorganism to compounds that interfere with that gene product's biological role. This sensitization is apparently restricted to compounds that interfere with the targeted gene and its product.

[0821] It will be appreciated that the cell-based assays described above may be implemented by providing an antisense nucleic acid complementary to at least a portion of an operon comprising a nucleotide sequence selected from the group consisting of SEQ ID NOs: 1-194, wherein the portion does not include a nucleotide sequence selected from the group consisting of SEQ ID NOs: 201-550 to Staphylococcus aureus or an organism selected from the group consisting of Acinetobacter baumannii, Anaplasma marginale, Bacillus anthracis, Bacteroides fragilis, Bordetella pertussis, Borrelia burgdorferi, Brucella abortus, Brucella melitensis, Burkholderia cepacia, Burkholderia fungorum, Burkholderia mallei, Campylobacter jejuni, Chlamydia pneumoniae, Chlamydia trachomatis, Clostridium acetobutylicum, Clostridium botulinum, Clostridium difficile, Clostridium perfringens, Corynebacterium diptheriae, Coxiella burnetii, Enterobacter cloacae, Enterococcus faecalis, Enterococcus faecium, Escherichia coli, Francisella tularensis, Haemophilus influenzae, Helicobacter pylori, Klebsiella pneumoniae, Legionella pneumophila, Listeria monocytogenes, Moraxella catarrhalis, Mycobacterium avium, Mycobacterium bovis, Mycobacterium leprae, Mycobacterium tuberculosis, Mycoplasma genitalium, Mycoplasma pneumoniae, Neisseria gonorrhoeae, Neisseria meningitidis, Nocardia asteroides, Pasteurella haemolytica, Pasteurella multocida, Proteus mirabilis, Proteus vulgaris, Pseudomonas aeruginosa, Pseudomonas putida, Pseudomonas syringae, Rickettsia rickettsii, Rochalimaea quintana, Salmonella bongori, Salmonella cholerasuis, Salmonella enterica, Salmonella paratyphi, Salmonella typhi, Salmonella typhimurium, Shigella boydii, Shigella dysenteriae, Shigellaflexneri, Shigella sonnei, Staphylococcus aureus, Staphylococcus epidermidis, Staphylococcus haemolyticus, Streptococcus pneumoniae, Streptococcus mutans, Streptococcus pyogenes, Treponema pallidum, Ureaplasma urealyticum, Vibrio cholerae, Vibrio parahaemolyticus, Vibrio vulnificans, Yersinia enterocolitica, Yersinia pestis or any species falling within the genera of any of the above species.

[0822] It will also be appreciated that the cell-based assays described above may be implemented by providing an antisense nucleic acid complementary to at least a portion of a proliferation-required operon comprising a gene that is homologous to a proliferation-required gene having a nucleotide sequence selected from the group consisting of SEQ ID NOs: 201-550 or by providing an antisense nucleic acid complementary to at least a portion of a proliferation-required operon comprising a gene encoding a polypeptide that is homologous to a proliferation-required polypeptide having an amino acid sequence selected from the group consisting of SEQ ID NOs: 551-824 to an organism selected from the group consisting of Acinetobacter baumannii, Anaplasma marginale, Bacillus anthracis, Bacteroides fragilis, Bordetella pertussis, Borrelia burgdorferi, Brucella abortus, Brucella melitensis, Burkholderia cepacia, Burkholderia fungorum, Burkholderia mallei, Campylobacter jejuni, Chlamydia pneumoniae, Chlamydia trachomatis, Clostridium acetobutylicum, Clostridium botulinum, Clostridium difficile, Clostridium perfringens, Corynebacterium diptheriae, Coxiella burnetii, Enterobacter cloacae, Enterococcus faecalis, Enterococcus faecium, Escherichia coli, Francisella tularensis, Haemophilus influenzae, Helicobacter pylori, Klebsiella pneumoniae, Legionella pneumophila, Listeria monocytogenes, Moraxella catarrhalis, Mycobacterium avium, Mycobacterium bovis, Mycobacterium leprae, Mycobacterium tuberculosis, Mycoplasma genitalium, Mycoplasma pneumoniae, Neisseria gonorrhoeae, Neisseria meningitidis, Nocardia asteroides, Pasteurella haemolytica, Pasteurella multocida, Proteus mirabilis, Proteus vulgaris, Pseudomonas aeruginosa, Pseudomonas putida, Pseudomonas syringae, Rickettsia rickettsii, Rochalimaea quintana, Salmonella bongori, Salmonella cholerasuis, Salmonella enterica, Salmonella paratyphi, Salmonella typhi, Salmonella typhimurium, Shigella boydii, Shigella dysenteriae, Shigellaflexneri, Shigella sonnei, Staphylococcus aureus, Staphylococcus epidermidis, Staphylococcus haemolyticus, Streptococcus pneumoniae, Streptococcus mutans, Streptococcus pyogenes, Treponema pallidum, Ureaplasma urealyticum, Vibrio cholerae, Vibrio parahaemolyticus, Vibrio vulnificans, Yersinia enterocolitica, Yersinia pestis or any species falling within the genera of any of the above species.

[0823] It will also be appreciated that the cell-based assays described above may be implemented by providing an antisense nucleic acid complementary to at least a portion of a proliferation-required operon, which has been identified by the methods described herein, to an organism selected from the group consisting of Acinetobacter baumannii, Anaplasma marginale, Bacillus anthracis, Bacteroides fragilis, Bordetella pertussis, Borrelia burgdorferi, Brucella abortus, Brucella melitensis, Burkholderia cepacia, Burkholderia fungorum, Burkholderia mallei, Campylobacter jejuni, Chlamydia pneumoniae, Chlamydia trachomatis, Clostridium acetobutylicum, Clostridium botulinum, Clostridium difficile, Clostridium perfringens, Corynebacterium diptheriae, Coxiella burnetii, Enterobacter cloacae, Enterococcus faecalis, Enterococcus faecium, Escherichia coli, Francisella tularensis, Haemophilus influenzae, Helicobacter pylori, Klebsiella pneumoniae, Legionella pneumophila, Listeria monocytogenes, Moraxella catarrhalis, Mycobacterium avium, Mycobacterium bovis, Mycobacterium leprae, Mycobacterium tuberculosis, Mycoplasma genitalium, Mycoplasma pneumoniae, Neisseria gonorrhoeae, Neisseria meningitidis, Nocardia asteroides, Pasteurella haemolytica, Pasteurella multocida, Proteus mirabilis, Proteus vulgaris, Pseudomonas aeruginosa, Pseudomonas putida, Pseudomonas syringae, Rickettsia rickettsii, Rochalimaea quintana, Salmonella bongori, Salmonella cholerasuis, Salmonella enterica, Salmonella paratyphi, Salmonella typhi, Salmonella typhimurium, Shigella boydii, Shigella dysenteriae, Shigella flexneri, Shigella sonnei, Staphylococcus aureus, Staphylococcus epidermidis, Staphylococcus haemolyticus, Streptococcus pneumoniae, Streptococcus mutans, Streptococcus pyogenes, Treponema pallidum, Ureaplasma urealyticum, Vibrio cholerae, Vibrio parahaemolyticus, Vibrio vulnificans, Yersinia enterocolitica, Yersinia pestis or any species falling within the genera of any of the above species.

[0824] In some embodiments of the present invention, the methods for the production of stabilized RNA, as described in U.S. patent application Ser. No. 10/327592, entitled STABILIZED NUCLEIC ACIDS IN GENE AND DRUG DISCOVERY AND METHODS OF USE, filed Dec. 20, 2002, the disclosure of which is incorporated herein by reference in its entirety, can be used in the above cell-based assays in Gram-negative organisms to extend the lifetime of transcripts corresponding to the nucleic acids described herein.

[0825] Assays utilizing antisense constructs to operons comprising essential genes or portions thereof can be used to identify compounds that interfere with the activity of those gene products. Such assays could be used to identify drug leads, for example antibiotics.

[0826] Panels of cells transcribing different antisense nucleic acids can be used to characterize the point of intervention of a compound affecting an essential biochemical pathway including antibiotics with no known mechanism of action.

[0827] Assays utilizing antisense constructs to operons comprising essential genes can be used to identify compounds that specifically interfere with the activity of multiple targets in a pathway. Such constructs can be used to simultaneously screen a sample against multiple targets in one pathway in one reaction (Combinatorial HTS).

[0828] Furthermore, as discussed above, panels of antisense construct-containing cells may be used to characterize the point of intervention of any compound affecting an essential biological pathway including antibiotics with no known mechanism of action.

[0829] It will be appreciated that the cell-based assays described above may be implemented by providing an antisense nucleic acid complementary to at least a portion of an operon comprising a nucleotide sequence selected from the group consisting of SEQ ID NOs: 1-194, wherein the portion does not include a nucleotide sequence selected from the group consisting of SEQ ID NOs: 201-550 to Staphylococcus aureus or an organism selected from the group consisting of Acinetobacter baumannii, Anaplasma marginale, Bacillus anthracis, Bacteroides fragilis, Bordetella pertussis, Borrelia burgdorferi, Brucella abortus, Brucella melitensis, Burkholderia cepacia, Burkholderia fungorum, Burkholderia mallei, Campylobacter jejuni, Chlamydia pneumoniae, Chlamydia trachomatis, Clostridium acetobutylicum, Clostridium botulinum, Clostridium difficile, Clostridium perfringens, Corynebacterium diptheriae, Coxiella burnetii, Enterobacter cloacae, Enterococcus faecalis, Enterococcus faecium, Escherichia coli, Francisella tularensis, Haemophilus influenzae, Helicobacter pylori, Klebsiella pneumoniae, Legionella pneumophila, Listeria monocytogenes, Moraxella catarrhalis, Mycobacterium avium, Mycobacterium bovis, Mycobacterium leprae, Mycobacterium tuberculosis, Mycoplasma genitalium, Mycoplasma pneumoniae, Neisseria gonorrhoeae, Neisseria meningitidis, Nocardia asteroides, Pasteurella haemolytica, Pasteurella multocida, Proteus mirabilis, Proteus vulgaris, Pseudomonas aeruginosa, Pseudomonas putida, Pseudomonas syringae, Rickettsia rickettsii, Rochalimaea quintana, Salmonella bongori, Salmonella cholerasuis, Salmonella enterica, Salmonella paratyphi, Salmonella typhi, Salmonella typhimurium, Shigella boydii, Shigella dysenteriae, Shigellaflexneri, Shigella sonnei, Staphylococcus aureus, Staphylococcus epidermidis, Staphylococcus haemolyticus, Streptococcus pneumoniae, Streptococcus mutans, Streptococcus pyogenes, Treponema pallidum, Ureaplasma urealyticum, Vibrio cholerae, Vibrio parahaemolyticus, Vibrio vulnificans, Yersinia enterocolitica, Yersinia pestis or any species falling within the genera of any of the above species.

[0830] It will also be appreciated that the cell-based assays described above may be implemented by providing an antisense nucleic acid complementary to at least a portion of a proliferation-required operon comprising a gene that is homologous to a proliferation-required gene having a nucleotide sequence selected from the group consisting of SEQ ID NOs: 201-550 or by providing an antisense nucleic acid complementary to at least a portion of a proliferation-required operon comprising a gene encoding a polypeptide that is homologous to a proliferation-required polypeptide having an amino acid sequence selected from the group consisting of SEQ ID NOs: 551-824 to an organism selected from the group consisting of Acinetobacter baumannii, Anaplasma marginale, Bacillus anthracis, Bacteroides fragilis, Bordetella pertussis, Borrelia burgdorferi, Brucella abortus, Brucella melitensis, Burkholderia cepacia, Burkholderia fungorum, Burkholderia mallei, Campylobacter jejuni, Chlamydia pneumoniae, Chlamydia trachomatis, Clostridium acetobutylicum, Clostridium botulinum, Clostridium difficile, Clostridium perfringens, Corynebacterium diptheriae, Coxiella burnetii, Enterobacter cloacae, Enterococcus faecalis, Enterococcus faecium, Escherichia coli, Francisella tularensis, Haemophilus influenzae, Helicobacter pylori, Klebsiella pneumoniae, Legionella pneumophila, Listeria monocytogenes, Moraxella catarrhalis, Mycobacterium avium, Mycobacterium bovis, Mycobacterium leprae, Mycobacterium tuberculosis, Mycoplasma genitalium, Mycoplasma pneumoniae, Neisseria gonorrhoeae, Neisseria meningitidis, Nocardia asteroides, Pasteurella haemolytica, Pasteurella multocida, Proteus mirabilis, Proteus vulgaris, Pseudomonas aeruginosa, Pseudomonas putida, Pseudomonas syringae, Rickettsia rickettsii, Rochalimaea quintana, Salmonella bongori, Salmonella cholerasuis, Salmonella enterica, Salmonella paratyphi, Salmonella typhi, Salmonella typhimurium, Shigella boydii, Shigella dysenteriae, Shigellaflexneri, Shigella sonnei, Staphylococcus aureus, Staphylococcus epidermidis, Staphylococcus haemolyticus, Streptococcus pneumoniae, Streptococcus mutans, Streptococcus pyogenes, Treponema pallidum, Ureaplasma urealyticum, Vibrio cholerae, Vibrio parahaemolyticus, Vibrio vulnificans, Yersinia enterocolitica, Yersinia pestis or any species falling within the genera of any of the above species.

[0831] It will also be appreciated that the cell-based assays described above may be implemented by providing an antisense nucleic acid complementary to at least a portion of a proliferation-required operon, which has been identified by the methods described herein, to an organism selected from the group consisting of Acinetobacter baumannii, Anaplasma marginale, Bacillus anthracis, Bacteroides fragilis, Bordetella pertussis, Borrelia burgdorferi, Brucella abortus, Brucella melitensis, Burkholderia cepacia, Burkholderia fungorum, Burkholderia mallei, Campylobacter jejuni, Chlamydia pneumoniae, Chlamydia trachomatis, Clostridium acetobutylicum, Clostridium botulinum, Clostridium difficile, Clostridium perfringens, Corynebacterium diptheriae, Coxiella burnetii, Enterobacter cloacae, Enterococcus faecalis, Enterococcus faecium, Escherichia coli, Francisella tularensis, Haemophilus influenzae, Helicobacter pylori, Klebsiella pneumoniae, Legionella pneumophila, Listeria monocytogenes, Moraxella catarrhalis, Mycobacterium avium, Mycobacterium bovis, Mycobacterium leprae, Mycobacterium tuberculosis, Mycoplasma genitalium, Mycoplasma pneumoniae, Neisseria gonorrhoeae, Neisseria meningitidis, Nocardia asteroides, Pasteurella haemolytica, Pasteurella multocida, Proteus mirabilis, Proteus vulgaris, Pseudomonas aeruginosa, Pseudomonas putida, Pseudomonas syringae, Rickettsia rickettsii, Rochalimaea quintana, Salmonella bongori, Salmonella cholerasuis, Salmonella enterica, Salmonella paratyphi, Salmonella typhi, Salmonella typhimurium, Shigella boydii, Shigella dysenteriae, Shigellaflexneri, Shigella sonnei, Staphylococcus aureus, Staphylococcus epidermidis, Staphylococcus haemolyticus, Streptococcus pneumoniae, Streptococcus mutans, Streptococcus pyogenes, Treponema pallidum, Ureaplasma urealyticum, Vibrio cholerae, Vibrio parahaemolyticus, Vibrio vulnificans, Yersinia enterocolitica, Yersinia pestis or any species falling within the genera of any of the above species.

[0832] In some embodiments of the present invention, the methods for the production of stabilized RNA, as described in U.S. patent application Ser. No. 10/327592, entitled STABILIZED NUCLEIC ACIDS IN GENE AND DRUG DISCOVERY AND METHODS OF USE, filed Dec. 20, 2002, the disclosure of which is incorporated herein by reference in its entirety, can be used in the above cell-based assays in Gram-negative organisms to extend the lifetime of transcripts corresponding to the nucleic acids described herein.

### Example 18

### Identification of Genes Required for Escherichia coli Proliferation, Operon Prediction, Inhibition of Proliferation and Cell-Based Assays

[0833] Genes required for proliferation in Escherichia coli are identified according to the methods described above. For example, promoters and vectors described herein can be used to identify proliferation required genes. Operons which comprise one or more of the above-identified, proliferation-required genes are predicted using the operon prediction methods described herein. An antisense nucleic acid that is complementary to at least a portion of a predicted proliferation-required operon is provided to the cell thereby inhibiting proliferation. Because the antisense nucleic acid can be produced at levels that range from lethal to sublethal, inhibition of proliferation can be either complete or partial. If proliferation of the cell is only partially inhibited, the cell becomes sensitized. Sensitized cells are contacted with compounds present in a library of compounds. A further reduction in the proliferation of the sensitized cell after being contacted with the compound indicates that the compound possesses the ability to inhibit cellular proliferation.

### Example 19

### Identification of Genes Required for Staphylococcus aureus Proliferation, Operon Prediction, Inhibition of Proliferation and Cell-Based Assays

[0834] Genes required for proliferation in Staphylococcus aureus are identified according to the methods described above. For example, promoters and vectors described herein can be used to identify proliferation required genes. Operons which comprise one or more of the above-identified, proliferation-required genes are predicted using the operon prediction methods described herein. An antisense nucleic acid that is complementary to at least a portion of a predicted proliferation-required operon is provided to the cell thereby inhibiting proliferation. Because the antisense nucleic acid can be produced at levels that range from lethal to sublethal, inhibition of proliferation can be either complete or partial. If proliferation of the cell is only partially inhibited, the cell becomes sensitized. Sensitized cells are contacted with compounds present in a library of compounds. A further reduction in the proliferation of the sensitized cell after being contacted with the compound indicates that the compound possesses the ability to inhibit cellular proliferation.

### Example 20

### Identification of Genes Required for Enterococcus faecalis Proliferation, Operon Prediction, Inhibition of Proliferation and Cell-Based Assays

[0835] Genes required for proliferation in Enterococcus faecalis are identified according to the methods described above. For example, promoters and vectors described herein can be used to identify proliferation required genes. Operons which comprise one or more of the above-identified, proliferation-required genes are predicted using the operon prediction methods described herein. An antisense nucleic acid that is complementary to at least a portion of a predicted proliferation-required operon is provided to the cell thereby inhibiting proliferation. Because the antisense nucleic acid can be produced at levels that range from lethal to sublethal, inhibition of proliferation can be either complete or partial. If proliferation of the cell is only partially inhibited, the cell becomes sensitized. Sensitized cells are contacted with compounds present in a library of compounds. A further reduction in the proliferation of the sensitized cell after being contacted with the compound indicates that the compound possesses the ability to inhibit cellular proliferation.

### Example 21

### Identification of Genes Required for Klebsiella pneumoniae Proliferation, Operon Prediction, Inhibition of Proliferation and Cell-Based Assays

[0836] Genes required for proliferation in Klebsiella pneumoniae are identified according to the methods described above. For example, promoters and vectors described herein can be used to identify proliferation required genes. Operons which comprise one or more of the above-identified, proliferation-required genes are predicted using the operon prediction methods described herein. An antisense nucleic acid that is complementary to at least a portion of a predicted proliferation-required operon is provided to the cell thereby inhibiting proliferation. Because the antisense nucleic acid can be produced at levels that range from lethal to sublethal, inhibition of proliferation can be either complete or partial. If proliferation of the cell is only partially inhibited, the cell becomes sensitized. Sensitized cells are contacted with compounds present in a library of compounds. A further reduction in the proliferation of the sensitized cell after being contacted with the compound indicates that the compound possesses the ability to inhibit cellular proliferation.

### Example 22

### Identification of Genes Required for Pseudomonas aeruginosa Proliferation, Operon Prediction, Inhibition of Proliferation and Cell-Based Assays

[0837] Genes required for proliferation in Pseudomonas aeruginosa are identified according to the methods described above. For example, promoters and vectors described herein can be used to identify proliferation required genes. Operons which comprise one or more of the above-identified, proliferation-required genes are predicted using the operon prediction methods described herein. An antisense nucleic acid that is complementary to at least a portion of a predicted proliferation-required operon is provided to the cell thereby inhibiting proliferation. Because the antisense nucleic acid can be produced at levels that range from lethal to sublethal, inhibition of proliferation can be either complete or partial. If proliferation of the cell is only partially inhibited, the cell becomes sensitized. Sensitized cells are contacted with compounds present in a library of compounds. A further reduction in the proliferation of the sensitized cell after being contacted with the compound indicates that the compound possesses the ability to inhibit cellular proliferation.

### Example 23

### Identification of Genes Required for Salmonella typhimurium Proliferation, Operon Prediction, Inhibition of Proliferation and Cell-Based Assays

[0838] Genes required for proliferation in Salmonella typhimurium are identified according to the methods described above. For example, promoters and vectors described herein can be used to identify proliferation required genes. Operons which comprise one or more of the above-identified, proliferation-required genes are predicted using the operon prediction methods described herein. An antisense nucleic acid that is complementary to at least a portion of a predicted proliferation-required operon is provided to the cell thereby inhibiting proliferation. Because the antisense nucleic acid can be produced at levels that range from lethal to sublethal, inhibition of proliferation can be either complete or partial. If proliferation of the cell is only partially inhibited, the cell becomes sensitized. Sensitized cells are contacted with compounds present in a library of compounds. A further reduction in the proliferation of the sensitized cell after being contacted with the compound indicates that the compound possesses the ability to inhibit cellular proliferation.

### Example 24

### Identification of Genes Required for Acinetobacter baumannii Proliferation, Operon Prediction, Inhibition of Proliferation and Cell-Based Assays

[0839] Genes required for proliferation in Acinetobacter baumannii are identified according to the methods described above. For example, promoters and vectors described herein can be used to identify proliferation required genes. Operons which comprise one or more of the above-identified, proliferation-required genes are predicted using the operon prediction methods described herein. An antisense nucleic acid that is complementary to at least a portion of a predicted proliferation-required operon is provided to the cell thereby inhibiting proliferation. Because the antisense nucleic acid can be produced at levels that range from lethal to sublethal, inhibition of proliferation can be either complete or partial. If proliferation of the cell is only partially inhibited, the cell becomes sensitized. Sensitized cells are contacted with compounds present in a library of compounds. A further reduction in the proliferation of the sensitized cell after being contacted with the compound indicates that the compound possesses the ability to inhibit cellular proliferation.

### Example 25

### Identification of Genes Required for Bacillus anthracis Proliferation, Operon Prediction, Inhibition of Proliferation and Cell-Based Assays

[0840] Genes required for proliferation in Bacillus anthracis are identified according to the methods described above. For example, promoters and vectors described herein can be used to identify proliferation required genes. Operons which comprise one or more of the above-identified, proliferation-required genes are predicted using the operon prediction methods described herein. An antisense nucleic acid that is complementary to at least a portion of a predicted proliferation-required operon is provided to the cell thereby inhibiting proliferation. Because the antisense nucleic acid can be produced at levels that range from lethal to sublethal, inhibition of proliferation can be either complete or partial. If proliferation of the cell is only partially inhibited, the cell becomes sensitized. Sensitized cells are contacted with compounds present in a library of compounds. A further reduction in the proliferation of the sensitized cell after being contacted with the compound indicates that the compound possesses the ability to inhibit cellular proliferation.

### Example 26

### Identification of Genes Required for Bordetella pertussis Proliferation, Operon Prediction, Inhibition of Proliferation and Cell-Based Assays

[0841] Genes required for proliferation in Bordetella pertussis are identified according to the methods described above. For example, promoters and vectors described herein can be used to identify proliferation required genes. Operons which comprise one or more of the above-identified, proliferation-required genes are predicted using the operon prediction methods described herein. An antisense nucleic acid that is complementary to at least a portion of a predicted proliferation-required operon is provided to the cell thereby inhibiting proliferation. Because the antisense nucleic acid can be produced at levels that range from lethal to sublethal, inhibition of proliferation can be either complete or partial. If proliferation of the cell is only partially inhibited, the cell becomes sensitized. Sensitized cells are contacted with compounds present in a library of compounds. A further reduction in the proliferation of the sensitized cell after being contacted with the compound indicates that the compound possesses the ability to inhibit cellular proliferation.

### Example 27

### Identification of Genes Required for Borrelia burgdorferi Proliferation, Operon Prediction, Inhibition of Proliferation and Cell-Based Assays

[0842] Genes required for proliferation in Borrelia burgdorferi are identified according to the methods described above. For example, promoters and vectors described herein can be used to identify proliferation required genes. Operons which comprise one or more of the above-identified, proliferation-required genes are predicted using the operon prediction methods described herein. An antisense nucleic acid that is complementary to at least a portion of a predicted proliferation-required operon is provided to the cell thereby inhibiting proliferation. Because the antisense nucleic acid can be produced at levels that range from lethal to sublethal, inhibition of proliferation can be either complete or partial. If proliferation of the cell is only partially inhibited, the cell becomes sensitized. Sensitized cells are contacted with compounds present in a library of compounds. A further reduction in the proliferation of the sensitized cell after being contacted with the compound indicates that the compound possesses the ability to inhibit cellular proliferation.

### Example 28

### Identification of Genes Required for Burkholderia cepacia Proliferation, Operon Prediction, Inhibition of Proliferation and Cell-Based Assays

[0843] Genes required for proliferation in Burkholderia cepacia are identified according to the methods described above. For example, promoters and vectors described herein can be used to identify proliferation required genes. Operons which comprise one or more of the above-identified, proliferation-required genes are predicted using the operon prediction methods described herein. An antisense nucleic acid that is complementary to at least a portion of a predicted proliferation-required operon is provided to the cell thereby inhibiting proliferation. Because the antisense nucleic acid can be produced at levels that range from lethal to sublethal, inhibition of proliferation can be either complete or partial. If proliferation of the cell is only partially inhibited, the cell becomes sensitized. Sensitized cells are contacted with compounds present in a library of compounds. A further reduction in the proliferation of the sensitized cell after being contacted with the compound indicates that the compound possesses the ability to inhibit cellular proliferation.

### Example 29

### Identification of Genes Required for Burkholderia fungorum Proliferation, Operon Prediction, Inhibition of Proliferation and Cell-Based Assays

[0844] Genes required for proliferation in Burkholderia fungorum are identified according to the methods described above. For example, promoters and vectors described herein can be used to identify proliferation required genes. Operons which comprise one or more of the above-identified, proliferation-required genes are predicted using the operon prediction methods described herein. An antisense nucleic acid that is complementary to at least a portion of a predicted proliferation-required operon is provided to the cell thereby inhibiting proliferation. Because the antisense nucleic acid can be produced at levels that range from lethal to sublethal, inhibition of proliferation can be either complete or partial. If proliferation of the cell is only partially inhibited, the cell becomes sensitized. Sensitized cells are contacted with compounds present in a library of compounds. A further reduction in the proliferation of the sensitized cell after being contacted with the compound indicates that the compound possesses the ability to inhibit cellular proliferation.

### Example 30

### Identification of Genes Required for Burkholderia mallei Proliferation, Operon Prediction, Inhibition of Proliferation and Cell-Based Assays

[0845] Genes required for proliferation in Burkholderia mallei are identified according to the methods described above. For example, promoters and vectors described herein can be used to identify proliferation required genes. Operons which comprise one or more of the above-identified, proliferation-required genes are predicted using the operon prediction methods described herein. An antisense nucleic acid that is complementary to at least a portion of a predicted proliferation-required operon is provided to the cell thereby inhibiting proliferation. Because the antisense nucleic acid can be produced at levels that range from lethal to sublethal, inhibition of proliferation can be either complete or partial. If proliferation of the cell is only partially inhibited, the cell becomes sensitized. Sensitized cells are contacted with compounds present in a library of compounds. A further reduction in the proliferation of the sensitized cell after being contacted with the compound indicates that the compound possesses the ability to inhibit cellular proliferation.

### Example 31

### Identification of Genes Required for Campylobacter jejuni Proliferation, Operon Prediction, Inhibition of Proliferation and Cell-Based Assays

[0846] Genes required for proliferation in Campylobacter jejuni are identified according to the methods described above. For example, promoters and vectors described herein can be used to identify proliferation required genes. Operons which comprise one or more of the above-identified, proliferation-required genes are predicted using the operon prediction methods described herein. An antisense nucleic acid that is complementary to at least a portion of a predicted proliferation-required operon is provided to the cell thereby inhibiting proliferation. Because the antisense nucleic acid can be produced at levels that range from lethal to sublethal, inhibition of proliferation can be either complete or partial. If proliferation of the cell is only partially inhibited, the cell becomes sensitized. Sensitized cells are contacted with compounds present in a library of compounds. A further reduction in the proliferation of the sensitized cell after being contacted with the compound indicates that the compound possesses the ability to inhibit cellular proliferation.

### Example 32

### Identification of Genes Required for Chlamydia pneumoniae Proliferation, Operon Prediction, Inhibition of Proliferation and Cell-Based Assays

[0847] Genes required for proliferation in Chlamydia pneumoniae are identified according to the methods described above. For example, promoters and vectors described herein can be used to identify proliferation required genes. Operons which comprise one or more of the above-identified, proliferation-required genes are predicted using the operon prediction methods described herein. An antisense nucleic acid that is complementary to at least a portion of a predicted proliferation-required operon is provided to the cell thereby inhibiting proliferation. Because the antisense nucleic acid can be produced at levels that range from lethal to sublethal, inhibition of proliferation can be either complete or partial. If proliferation of the cell is only partially inhibited, the cell becomes sensitized. Sensitized cells are contacted with compounds present in a library of compounds. A further reduction in the proliferation of the sensitized cell after being contacted with the compound indicates that the compound possesses the ability to inhibit cellular proliferation.

### Example 33

### Identification of Genes Required for Chlamydia trachomatis Proliferation, Operon Prediction, Inhibition of Proliferation and Cell-Based Assays

[0848] Genes required for proliferation in Chlamydia trachomatis are identified according to the methods described above. For example, promoters and vectors described herein can be used to identify proliferation required genes. Operons which comprise one or more of the above-identified, proliferation-required genes are predicted using the operon prediction methods described herein. An antisense nucleic acid that is complementary to at least a portion of a predicted proliferation-required operon is provided to the cell thereby inhibiting proliferation. Because the antisense nucleic acid can be produced at levels that range from lethal to sublethal, inhibition of proliferation can be either complete or partial. If proliferation of the cell is only partially inhibited, the cell becomes sensitized. Sensitized cells are contacted with compounds present in a library of compounds. A further reduction in the proliferation of the sensitized cell after being contacted with the compound indicates that the compound possesses the ability to inhibit cellular proliferation.

### Example 34

### Identification of Genes Required for Clostridium acetobutylicum Proliferation, Operon Prediction, Inhibition of Proliferation and Cell-Based Assays

[0849] Genes required for proliferation in Clostridium acetobutylicum are identified according to the methods described above. For example, promoters and vectors described herein can be used to identify proliferation required genes. Operons which comprise one or more of the above-identified, proliferation-required genes are predicted using the operon prediction methods described herein. An antisense nucleic acid that is complementary to at least a portion of a predicted proliferation-required operon is provided to the cell thereby inhibiting proliferation. Because the antisense nucleic acid can be produced at levels that range from lethal to sublethal, inhibition of proliferation can be either complete or partial. If proliferation of the cell is only partially inhibited, the cell becomes sensitized. Sensitized cells are contacted with compounds present in a library of compounds. A further reduction in the proliferation of the sensitized cell after being contacted with the compound indicates that the compound possesses the ability to inhibit cellular proliferation.

### Example 35

### Identification of Genes Required for Clostridium botulinum Proliferation, Operon Prediction, Inhibition of Proliferation and Cell-Based Assays

[0850] Genes required for proliferation in Clostridium botulinum are identified according to the methods described above. For example, promoters and vectors described herein can be used to identify proliferation required genes. Operons which comprise one or more of the above-identified, proliferation-required genes are predicted using the operon prediction methods described herein. An antisense nucleic acid that is complementary to at least a portion of a predicted proliferation-required operon is provided to the cell thereby inhibiting proliferation. Because the antisense nucleic acid can be produced at levels that range from lethal to sublethal, inhibition of proliferation can be either complete or partial. If proliferation of the cell is only partially inhibited, the cell becomes sensitized. Sensitized cells are contacted with compounds present in a library of compounds. A further reduction in the proliferation of the sensitized cell after being contacted with the compound indicates that the compound possesses the ability to inhibit cellular proliferation.

### Example 36

### Identification of Genes Required for Clostridium difficile Proliferation, Operon Prediction, Inhibition of Proliferation and Cell-Based Assays

[0851] Genes required for proliferation in Clostridium difficile are identified according to the methods described above. For example, promoters and vectors described herein can be used to identify proliferation required genes. Operons which comprise one or more of the above-identified, proliferation-required genes are predicted using the operon prediction methods described herein. An antisense nucleic acid that is complementary to at least a portion of a predicted proliferation-required operon is provided to the cell thereby inhibiting proliferation. Because the antisense nucleic acid can be produced at levels that range from lethal to sublethal, inhibition of proliferation can be either complete or partial. If proliferation of the cell is only partially inhibited, the cell becomes sensitized. Sensitized cells are contacted with compounds present in a library of compounds. A further reduction in the proliferation of the sensitized cell after being contacted with the compound indicates that the compound possesses the ability to inhibit cellular proliferation.

### Example 37

### Identification of Genes Required for Corynebacterium diptheriae Proliferation, Operon Prediction, Inhibition of Proliferation and Cell-Based Assays

[0852] Genes required for proliferation in Corynebacterium diptheriae are identified according to the methods described above. For example, promoters and vectors described herein can be used to identify proliferation required genes. Operons which comprise one or more of the above-identified, proliferation-required genes are predicted using the operon prediction methods described herein. An antisense nucleic acid that is complementary to at least a portion of a predicted proliferation-required operon is provided to the cell thereby inhibiting proliferation. Because the antisense nucleic acid can be produced at levels that range from lethal to sublethal, inhibition of proliferation can be either complete or partial. If proliferation of the cell is only partially inhibited, the cell becomes sensitized. Sensitized cells are contacted with compounds present in a library of compounds. A further reduction in the proliferation of the sensitized cell after being contacted with the compound indicates that the compound possesses the ability to inhibit cellular proliferation.

### Example 38

### Identification of Genes Required for Enterobacter cloacae Proliferation, Operon Prediction, Inhibition of Proliferation and Cell-Based Assays

[0853] Genes required for proliferation in Enterobacter cloacae are identified according to the methods described above. For example, promoters and vectors described herein can be used to identify proliferation required genes. Operons which comprise one or more of the above-identified, proliferation-required genes are predicted using the operon prediction methods described herein. An antisense nucleic acid that is complementary to at least a portion of a predicted proliferation-required operon is provided to the cell thereby inhibiting proliferation. Because the antisense nucleic acid can be produced at levels that range from lethal to sublethal, inhibition of proliferation can be either complete or partial. If proliferation of the cell is only partially inhibited, the cell becomes sensitized. Sensitized cells are contacted with compounds present in a library of compounds. A further reduction in the proliferation of the sensitized cell after being contacted with the compound indicates that the compound possesses the ability to inhibit cellular proliferation.

### Example 39

### Identification of Genes Required for Enterococcus faecium Proliferation, Operon Prediction, Inhibition of Proliferation and Cell-Based Assays

[0854] Genes required for proliferation in Enterococcus faecium are identified according to the methods described above. For example, promoters and vectors described herein can be used to identify proliferation required genes. Operons which comprise one or more of the above-identified, proliferation-required genes are predicted using the operon prediction methods described herein. An antisense nucleic acid that is complementary to at least a portion of a predicted proliferation-required operon is provided to the cell thereby inhibiting proliferation. Because the antisense nucleic acid can be produced at levels that range from lethal to sublethal, inhibition of proliferation can be either complete or partial. If proliferation of the cell is only partially inhibited, the cell becomes sensitized. Sensitized cells are contacted with compounds present in a library of compounds. A further reduction in the proliferation of the sensitized cell after being contacted with the compound indicates that the compound possesses the ability to inhibit cellular proliferation.

### Example 40

### Identification of Genes Required for Haemophilus influenzae Proliferation, Operon Prediction, Inhibition of Proliferation and Cell-Based Assays

[0855] Genes required for proliferation in Haemophilus influenzae are identified according to the methods described above. For example, promoters and vectors described herein can be used to identify proliferation required genes. Operons which comprise one or more of the above-identified, proliferation-required genes are predicted using the operon prediction methods described herein. An antisense nucleic acid that is complementary to at least a portion of a predicted proliferation-required operon is provided to the cell thereby inhibiting proliferation. Because the antisense nucleic acid can be produced at levels that range from lethal to sublethal, inhibition of proliferation can be either complete or partial. If proliferation of the cell is only partially inhibited, the cell becomes sensitized. Sensitized cells are contacted with compounds present in a library of compounds. A further reduction in the proliferation of the sensitized cell after being contacted with the compound indicates that the compound possesses the ability to inhibit cellular proliferation.

### Example 41

### Identification of Genes Required for Helicobacter pylori Proliferation, Operon Prediction, Inhibition of Proliferation and Cell-Based Assays

[0856] Genes required for proliferation in Helicobacter pylori are identified according to the methods described above. For example, promoters and vectors described herein can be used to identify proliferation required genes. Operons which comprise one or more of the above-identified, proliferation-required genes are predicted using the operon prediction methods described herein. An antisense nucleic acid that is complementary to at least a portion of a predicted proliferation-required operon is provided to the cell thereby inhibiting proliferation. Because the antisense nucleic acid can be produced at levels that range from lethal to sublethal, inhibition of proliferation can be either complete or partial. If proliferation of the cell is only partially inhibited, the cell becomes sensitized. Sensitized cells are contacted with compounds present in a library of compounds. A further reduction in the proliferation of the sensitized cell after being contacted with the compound indicates that the compound possesses the ability to inhibit cellular proliferation.

### Example 42

### Identification of Genes Required for Legionella pneumophila Proliferation, Operon Prediction, Inhibition of Proliferation and Cell-Based Assays

[0857] Genes required for proliferation in Legionella pneumophila are identified according to the methods described above. For example, promoters and vectors described herein can be used to identify proliferation required genes. Operons which comprise one or more of the above-identified, proliferation-required genes are predicted using the operon prediction methods described herein. An antisense nucleic acid that is complementary to at least a portion of a predicted proliferation-required operon is provided to the cell thereby inhibiting proliferation. Because the antisense nucleic acid can be produced at levels that range from lethal to sublethal, inhibition of proliferation can be either complete or partial. If proliferation of the cell is only partially inhibited, the cell becomes sensitized. Sensitized cells are contacted with compounds present in a library of compounds. A further reduction in the proliferation of the sensitized cell after being contacted with the compound indicates that the compound possesses the ability to inhibit cellular proliferation.

### Example 43

### Identification of Genes Required for Listeria monocytogenes Proliferation, Operon Prediction, Inhibition of Proliferation and Cell-Based Assays

[0858] Genes required for proliferation in Listeria monocytogenes are identified according to the methods described above. For example, promoters and vectors described herein can be used to identify proliferation required genes. Operons which comprise one or more of the above-identified, proliferation-required genes are predicted using the operon prediction methods described herein. An antisense nucleic acid that is complementary to at least a portion of a predicted proliferation-required operon is provided to the cell thereby inhibiting proliferation. Because the antisense nucleic acid can be produced at levels that range from lethal to sublethal, inhibition of proliferation can be either complete or partial. If proliferation of the cell is only partially inhibited, the cell becomes sensitized. Sensitized cells are contacted with compounds present in a library of compounds. A further reduction in the proliferation of the sensitized cell after being contacted with the compound indicates that the compound possesses the ability to inhibit cellular proliferation.

### Example 44

### Identification of Genes Required for Moraxella catarrhalis Proliferation, Operon Prediction, Inhibition of Proliferation and Cell-Based Assays

[0859] Genes required for proliferation in Moraxella catarrhalis are identified according to the methods described above. For example, promoters and vectors described herein can be used to identify proliferation required genes. Operons which comprise one or more of the above-identified, proliferation-required genes are predicted using the operon prediction methods described herein. An antisense nucleic acid that is complementary to at least a portion of a predicted proliferation-required operon is provided to the cell thereby inhibiting proliferation. Because the antisense nucleic acid can be produced at levels that range from lethal to sublethal, inhibition of proliferation can be either complete or partial. If proliferation of the cell is only partially inhibited, the cell becomes sensitized. Sensitized cells are contacted with compounds present in a library of compounds. A further reduction in the proliferation of the sensitized cell after being contacted with the compound indicates that the compound possesses the ability to inhibit cellular proliferation.

### Example 45

### Identification of Genes Required for Mycobacterium avium Proliferation, Operon Prediction, Inhibition of Proliferation and Cell-Based Assays

[0860] Genes required for proliferation in Mycobacterium avium are identified according to the methods described above. For example, promoters and vectors described herein can be used to identify proliferation required genes. Operons which comprise one or more of the above-identified, proliferation-required genes are predicted using the operon prediction methods described herein. An antisense nucleic acid that is complementary to at least a portion of a predicted proliferation-required operon is provided to the cell thereby inhibiting proliferation. Because the antisense nucleic acid can be produced at levels that range from lethal to sublethal, inhibition of proliferation can be either complete or partial. If proliferation of the cell is only partially inhibited, the cell becomes sensitized. Sensitized cells are contacted with compounds present in a library of compounds. A further reduction in the proliferation of the sensitized cell after being contacted with the compound indicates that the compound possesses the ability to inhibit cellular proliferation.

### Example 46

### Identification of Genes Required for Mycobacterium bovis Proliferation, Operon Prediction, Inhibition of Proliferation and Cell-Based Assays

[0861] Genes required for proliferation in Mycobacterium bovis are identified according to the methods described above. For example, promoters and vectors described herein can be used to identify proliferation required genes. Operons which comprise one or more of the above-identified, proliferation-required genes are predicted using the operon prediction methods described herein. An antisense nucleic acid that is complementary to at least a portion of a predicted proliferation-required operon is provided to the cell thereby inhibiting proliferation. Because the antisense nucleic acid can be produced at levels that range from lethal to sublethal, inhibition of proliferation can be either complete or partial. If proliferation of the cell is only partially inhibited, the cell becomes sensitized. Sensitized cells are contacted with compounds present in a library of compounds. A further reduction in the proliferation of the sensitized cell after being contacted with the compound indicates that the compound possesses the ability to inhibit cellular proliferation.

### Example 47

### Identification of Genes Required for Mycobacterium leprae Proliferation, Operon Prediction, Inhibition of Proliferation and Cell-Based Assays

[0862] Genes required for proliferation in Mycobacterium leprae are identified according to the methods described above. For example, promoters and vectors described herein can be used to identify proliferation required genes. Operons which comprise one or more of the above-identified, proliferation-required genes are predicted using the operon prediction methods described herein. An antisense nucleic acid that is complementary to at least a portion of a predicted proliferation-required operon is provided to the cell thereby inhibiting proliferation. Because the antisense nucleic acid can be produced at levels that range from lethal to sublethal, inhibition of proliferation can be either complete or partial. If proliferation of the cell is only partially inhibited, the cell becomes sensitized. Sensitized cells are contacted with compounds present in a library of compounds. A further reduction in the proliferation of the sensitized cell after being contacted with the compound indicates that the compound possesses the ability to inhibit cellular proliferation.

### Example 48

### Identification of Genes Required for Mycobacterium tuberculosis Proliferation, Operon Prediction, Inhibition of Proliferation and Cell-Based Assays

[0863] Genes required for proliferation in Mycobacterium tuberculosis are identified according to the methods described above. For example, promoters and vectors described herein can be used to identify proliferation required genes. Operons which comprise one or more of the above-identified, proliferation-required genes are predicted using the operon prediction methods described herein. An antisense nucleic acid that is complementary to at least a portion of a predicted proliferation-required operon is provided to the cell thereby inhibiting proliferation. Because the antisense nucleic acid can be produced at levels that range from lethal to sublethal, inhibition of proliferation can be either complete or partial. If proliferation of the cell is only partially inhibited, the cell becomes sensitized. Sensitized cells are contacted with compounds present in a library of compounds. A further reduction in the proliferation of the sensitized cell after being contacted with the compound indicates that the compound possesses the ability to inhibit cellular proliferation.

### Example 49

### Identification of Genes Required for Mycoplasma genitalium Proliferation, Operon Prediction, Inhibition of Proliferation and Cell-Based Assays

[0864] Genes required for proliferation in Mycoplasma genitalium are identified according to the methods described above. For example, promoters and vectors described herein can be used to identify proliferation required genes. Operons which comprise one or more of the above-identified, proliferation-required genes are predicted using the operon prediction methods described herein. An antisense nucleic acid that is complementary to at least a portion of a predicted proliferation-required operon is provided to the cell thereby inhibiting proliferation. Because the antisense nucleic acid can be produced at levels that range from lethal to sublethal, inhibition of proliferation can be either complete or partial. If proliferation of the cell is only partially inhibited, the cell becomes sensitized. Sensitized cells are contacted with compounds present in a library of compounds. A further reduction in the proliferation of the sensitized cell after being contacted with the compound indicates that the compound possesses the ability to inhibit cellular proliferation.

### Example 50

### Identification of Genes Required for Mycoplasma pneumoniae Proliferation, Operon Prediction, Inhibition of Proliferation and Cell-Based Assays

[0865] Genes required for proliferation in Mycoplasma pneumoniae are identified according to the methods described above. For example, promoters and vectors described herein can be used to identify proliferation required genes. Operons which comprise one or more of the above-identified, proliferation-required genes are predicted using the operon prediction methods described herein. An antisense nucleic acid that is complementary to at least a portion of a predicted proliferation-required operon is provided to the cell thereby inhibiting proliferation. Because the antisense nucleic acid can be produced at levels that range from lethal to sublethal, inhibition of proliferation can be either complete or partial. If proliferation of the cell is only partially inhibited, the cell becomes sensitized. Sensitized cells are contacted with compounds present in a library of compounds. A further reduction in the proliferation of the sensitized cell after being contacted with the compound indicates that the compound possesses the ability to inhibit cellular proliferation.

### Example 51

### Identification of Genes Required for Neisseria gonorrhoeae Proliferation, Operon Prediction, Inhibition of Proliferation and Cell-Based Assays

[0866] Genes required for proliferation in Neisseria gonorrhoeae are identified according to the methods described above. For example, promoters and vectors described herein can be used to identify proliferation required genes. Operons which comprise one or more of the above-identified, proliferation-required genes are predicted using the operon prediction methods described herein. An antisense nucleic acid that is complementary to at least a portion of a predicted proliferation-required operon is provided to the cell thereby inhibiting proliferation. Because the antisense nucleic acid can be produced at levels that range from lethal to sublethal, inhibition of proliferation can be either complete or partial. If proliferation of the cell is only partially inhibited, the cell becomes sensitized. Sensitized cells are contacted with compounds present in a library of compounds. A further reduction in the proliferation of the sensitized cell after being contacted with the compound indicates that the compound possesses the ability to inhibit cellular proliferation.

### Example 52

### Identification of Genes Required for Neisseria meningitidis Proliferation, Operon Prediction, Inhibition of Proliferation and Cell-Based Assays

[0867] Genes required for proliferation in Neisseria meningitidis are identified according to the methods described above. For example, promoters and vectors described herein can be used to identify proliferation required genes. Operons which comprise one or more of the above-identified, proliferation-required genes are predicted using the operon prediction methods described herein. An antisense nucleic acid that is complementary to at least a portion of a predicted proliferation-required operon is provided to the cell thereby inhibiting proliferation. Because the antisense nucleic acid can be produced at levels that range from lethal to sublethal, inhibition of proliferation can be either complete or partial. If proliferation of the cell is only partially inhibited, the cell becomes sensitized. Sensitized cells are contacted with compounds present in a library of compounds. A further reduction in the proliferation of the sensitized cell after being contacted with the compound indicates that the compound possesses the ability to inhibit cellular proliferation.

### Example 53

### Identification of Genes Required for Pasteurella multocida Proliferation, Operon Prediction, Inhibition of Proliferation and Cell-Based Assays

[0868] Genes required for proliferation in Pasteurella multocida are identified according to the methods described above. For example, promoters and vectors described herein can be used to identify proliferation required genes. Operons which comprise one or more of the above-identified, proliferation-required genes are predicted using the operon prediction methods described herein. An antisense nucleic acid that is complementary to at least a portion of a predicted proliferation-required operon is provided to the cell thereby inhibiting proliferation. Because the antisense nucleic acid can be produced at levels that range from lethal to sublethal, inhibition of proliferation can be either complete or partial. If proliferation of the cell is only partially inhibited, the cell becomes sensitized. Sensitized cells are contacted with compounds present in a library of compounds. A further reduction in the proliferation of the sensitized cell after being contacted with the compound indicates that the compound possesses the ability to inhibit cellular proliferation.

### Example 54

### Identification of Genes Required for Proteus mirabilis Proliferation, Operon Prediction, Inhibition of Proliferation and Cell-Based Assays

[0869] Genes required for proliferation in Proteus mirabilis are identified according to the methods described above. For example, promoters and vectors described herein can be used to identify proliferation required genes. Operons which comprise one or more of the above-identified, proliferation-required genes are predicted using the operon prediction methods described herein. An antisense nucleic acid that is complementary to at least a portion of a predicted proliferation-required operon is provided to the cell thereby inhibiting proliferation. Because the antisense nucleic acid can be produced at levels that range from lethal to sublethal, inhibition of proliferation can be either complete or partial. If proliferation of the cell is only partially inhibited, the cell becomes sensitized. Sensitized cells are contacted with compounds present in a library of compounds. A further reduction in the proliferation of the sensitized cell after being contacted with the compound indicates that the compound possesses the ability to inhibit cellular proliferation.

### Example 55

### Identification of Genes Required for Pseudomonas putida Proliferation, Operon Prediction, Inhibition of Proliferation and Cell-Based Assays

[0870] Genes required for proliferation in Pseudomonas putida are identified according to the methods described above. For example, promoters and vectors described herein can be used to identify proliferation required genes. Operons which comprise one or more of the above-identified, proliferation-required genes are predicted using the operon prediction methods described herein. An antisense nucleic acid that is complementary to at least a portion of a predicted proliferation-required operon is provided to the cell thereby inhibiting proliferation. Because the antisense nucleic acid can be produced at levels that range from lethal to sublethal, inhibition of proliferation can be either complete or partial. If proliferation of the cell is only partially inhibited, the cell becomes sensitized. Sensitized cells are contacted with compounds present in a library of compounds. A further reduction in the proliferation of the sensitized cell after being contacted with the compound indicates that the compound possesses the ability to inhibit cellular proliferation.

### Example 56

### Identification of Genes Required for Pseudomonas syringae Proliferation, Operon Prediction, Inhibition of Proliferation and Cell-Based Assays

[0871] Genes required for proliferation in Pseudomonas syringae are identified according to the methods described above. For example, promoters and vectors described herein can be used to identify proliferation required genes. Operons which comprise one or more of the above-identified, proliferation-required genes are predicted using the operon prediction methods described herein. An antisense nucleic acid that is complementary to at least a portion of a predicted proliferation-required operon is provided to the cell thereby inhibiting proliferation. Because the antisense nucleic acid can be produced at levels that range from lethal to sublethal, inhibition of proliferation can be either complete or partial. If proliferation of the cell is only partially inhibited, the cell becomes sensitized. Sensitized cells are contacted with compounds present in a library of compounds. A further reduction in the proliferation of the sensitized cell after being contacted with the compound indicates that the compound possesses the ability to inhibit cellular proliferation.

### Example 57

### Identification of Genes Required for Salmonella paratyphi Proliferation, Operon Prediction, Inhibition of Proliferation and Cell-Based Assays

[0872] Genes required for proliferation in Salmonella paratyphi are identified according to the methods described above. For example, promoters and vectors described herein can be used to identify proliferation required genes. Operons which comprise one or more of the above-identified, proliferation-required genes are predicted using the operon prediction methods described herein. An antisense nucleic acid that is complementary to at least a portion of a predicted proliferation-required operon is provided to the cell thereby inhibiting proliferation. Because the antisense nucleic acid can be produced at levels that range from lethal to sublethal, inhibition of proliferation can be either complete or partial. If proliferation of the cell is only partially inhibited, the cell becomes sensitized. Sensitized cells are contacted with compounds present in a library of compounds. A further reduction in the proliferation of the sensitized cell after being contacted with the compound indicates that the compound possesses the ability to inhibit cellular proliferation.

### Example 58

### Identification of Genes Required for Salmonella typhi Proliferation, Operon Prediction, Inhibition of Proliferation and Cell-Based Assays

[0873] Genes required for proliferation in Salmonella typhi are identified according to the methods described above. For example, promoters and vectors described herein can be used to identify proliferation required genes. Operons which comprise one or more of the above-identified, proliferation-required genes are predicted using the operon prediction methods described herein. An antisense nucleic acid that is complementary to at least a portion of a predicted proliferation-required operon is provided to the cell thereby inhibiting proliferation. Because the antisense nucleic acid can be produced at levels that range from lethal to sublethal, inhibition of proliferation can be either complete or partial. If proliferation of the cell is only partially inhibited, the cell becomes sensitized. Sensitized cells are contacted with compounds present in a library of compounds. A further reduction in the proliferation of the sensitized cell after being contacted with the compound indicates that the compound possesses the ability to inhibit cellular proliferation.

### Example 59

### Identification of Genes Required for Staphylococcus epidermidis Proliferation, Operon Prediction, Inhibition of Proliferation and Cell-Based Assays

[0874] Genes required for proliferation in Staphylococcus epidermidis are identified according to the methods described above. For example, promoters and vectors described herein can be used to identify proliferation required genes. Operons which comprise one or more of the above-identified, proliferation-required genes are predicted using the operon prediction methods described herein. An antisense nucleic acid that is complementary to at least a portion of a predicted proliferation-required operon is provided to the cell thereby inhibiting proliferation. Because the antisense nucleic acid can be produced at levels that range from lethal to sublethal, inhibition of proliferation can be either complete or partial. If proliferation of the cell is only partially inhibited, the cell becomes sensitized. Sensitized cells are contacted with compounds present in a library of compounds. A further reduction in the proliferation of the sensitized cell after being contacted with the compound indicates that the compound possesses the ability to inhibit cellular proliferation.

### Example 60

### Identification of Genes Required for Staphylococcus haemolyticus Proliferation, Operon Prediction, Inhibition of Proliferation and Cell-Based Assays

[0875] Genes required for proliferation in Staphylococcus haemolyticus are identified according to the methods described above. For example, promoters and vectors described herein can be used to identify proliferation required genes. Operons which comprise one or more of the above-identified, proliferation-required genes are predicted using the operon prediction methods described herein. An antisense nucleic acid that is complementary to at least a portion of a predicted proliferation-required operon is provided to the cell thereby inhibiting proliferation. Because the antisense nucleic acid can be produced at levels that range from lethal to sublethal, inhibition of proliferation can be either complete or partial. If proliferation of the cell is only partially inhibited, the cell becomes sensitized. Sensitized cells are contacted with compounds present in a library of compounds. A further reduction in the proliferation of the sensitized cell after being contacted with the compound indicates that the compound possesses the ability to inhibit cellular proliferation.

### Example 61

### Identification of Genes Required for Streptococcus mutans Proliferation, Operon Prediction, Inhibition of Proliferation and Cell-Based Assays

[0876] Genes required for proliferation in Streptococcus mutans are identified according to the methods described above. For example, promoters and vectors described herein can be used to identify proliferation required genes. Operons which comprise one or more of the above-identified, proliferation-required genes are predicted using the operon prediction methods described herein. An antisense nucleic acid that is complementary to at least a portion of a predicted proliferation-required operon is provided to the cell thereby inhibiting proliferation. Because the antisense nucleic acid can be produced at levels that range from lethal to sublethal, inhibition of proliferation can be either complete or partial. If proliferation of the cell is only partially inhibited, the cell becomes sensitized. Sensitized cells are contacted with compounds present in a library of compounds. A further reduction in the proliferation of the sensitized cell after being contacted with the compound indicates that the compound possesses the ability to inhibit cellular proliferation.

### Example 62

### Identification of Genes Required for Streptococcus pneumoniae Proliferation, Operon Prediction, Inhibition of Proliferation and Cell-Based Assays

[0877] Genes required for proliferation in Streptococcus pneumoniae are identified according to the methods described above. For example, promoters and vectors described herein can be used to identify proliferation required genes. Operons which comprise one or more of the above-identified, proliferation-required genes are predicted using the operon prediction methods described herein. An antisense nucleic acid that is complementary to at least a portion of a predicted proliferation-required operon is provided to the cell thereby inhibiting proliferation. Because the antisense nucleic acid can be produced at levels that range from lethal to sublethal, inhibition of proliferation can be either complete or partial. If proliferation of the cell is only partially inhibited, the cell becomes sensitized. Sensitized cells are contacted with compounds present in a library of compounds. A further reduction in the proliferation of the sensitized cell after being contacted with the compound indicates that the compound possesses the ability to inhibit cellular proliferation.

### Example 63

### Identification of Genes Required for Streptococcus pyogenes Proliferation, Operon Prediction, Inhibition of Proliferation and Cell-Based Assays

[0878] Genes required for proliferation in Streptococcus pyogenes are identified according to the methods described above. For example, promoters and vectors described herein can be used to identify proliferation required genes. Operons which comprise one or more of the above-identified, proliferation-required genes are predicted using the operon prediction methods described herein. An antisense nucleic acid that is complementary to at least a portion of a predicted proliferation-required operon is provided to the cell thereby inhibiting proliferation. Because the antisense nucleic acid can be produced at levels that range from lethal to sublethal, inhibition of proliferation can be either complete or partial. If proliferation of the cell is only partially inhibited, the cell becomes sensitized. Sensitized cells are contacted with compounds present in a library of compounds. A further reduction in the proliferation of the sensitized cell after being contacted with the compound indicates that the compound possesses the ability to inhibit cellular proliferation.

### Example 64

### Identification of Genes Required for Treponema pallidum Proliferation, Operon Prediction, Inhibition of Proliferation and Cell-Based Assays

[0879] Genes required for proliferation in Treponema pallidum are identified according to the methods described above. For example, promoters and vectors described herein can be used to identify proliferation required genes. Operons which comprise one or more of the above-identified, proliferation-required genes are predicted using the operon prediction methods described herein. An antisense nucleic acid that is complementary to at least a portion of a predicted proliferation-required operon is provided to the cell thereby inhibiting proliferation. Because the antisense nucleic acid can be produced at levels that range from lethal to sublethal, inhibition of proliferation can be either complete or partial. If proliferation of the cell is only partially inhibited, the cell becomes sensitized. Sensitized cells are contacted with compounds present in a library of compounds. A further reduction in the proliferation of the sensitized cell after being contacted with the compound indicates that the compound possesses the ability to inhibit cellular proliferation.

### Example 65

### Identification of Genes Required for Ureaplasma urealyticum Proliferation, Operon Prediction, Inhibition of Proliferation and Cell-Based Assays

[0880] Genes required for proliferation in Ureaplasma urealyticum are identified according to the methods described above. For example, promoters and vectors described herein can be used to identify proliferation required genes. Operons which comprise one or more of the above-identified, proliferation-required genes are predicted using the operon prediction methods described herein. An antisense nucleic acid that is complementary to at least a portion of a predicted proliferation-required operon is provided to the cell thereby inhibiting proliferation. Because the antisense nucleic acid can be produced at levels that range from lethal to sublethal, inhibition of proliferation can be either complete or partial. If proliferation of the cell is only partially inhibited, the cell becomes sensitized. Sensitized cells are contacted with compounds present in a library of compounds. A further reduction in the proliferation of the sensitized cell after being contacted with the compound indicates that the compound possesses the ability to inhibit cellular proliferation.

### Example 66

### Identification of Genes Required for Vibrio cholerae Proliferation, Operon Prediction, Inhibition of Proliferation and Cell-Based Assays

[0881] Genes required for proliferation in Vibrio cholerae are identified according to the methods described above. For example, promoters and vectors described herein can be used to identify proliferation required genes. Operons which comprise one or more of the above-identified, proliferation-required genes are predicted using the operon prediction methods described herein. An antisense nucleic acid that is complementary to at least a portion of a predicted proliferation-required operon is provided to the cell thereby inhibiting proliferation. Because the antisense nucleic acid can be produced at levels that range from lethal to sublethal, inhibition of proliferation can be either complete or partial. If proliferation of the cell is only partially inhibited, the cell becomes sensitized. Sensitized cells are contacted with compounds present in a library of compounds. A further reduction in the proliferation of the sensitized cell after being contacted with the compound indicates that the compound possesses the ability to inhibit cellular proliferation.

### Example 67

### Identification of Genes Required for Yersinia pestis Proliferation, Operon Prediction, Inhibition of Proliferation and Cell-Based Assays

[0882] Genes required for proliferation in Yersinia pestis are identified according to the methods described above. For example, promoters and vectors described herein can be used to identify proliferation required genes. Operons which comprise one or more of the above-identified, proliferation-required genes are predicted using the operon prediction methods described herein. An antisense nucleic acid that is complementary to at least a portion of a predicted proliferation-required operon is provided to the cell thereby inhibiting proliferation. Because the antisense nucleic acid can be produced at levels that range from lethal to sublethal, inhibition of proliferation can be either complete or partial. If proliferation of the cell is only partially inhibited, the cell becomes sensitized. Sensitized cells are contacted with compounds present in a library of compounds. A further reduction in the proliferation of the sensitized cell after being contacted with the compound indicates that the compound possesses the ability to inhibit cellular proliferation.

### Example 68

### Identification of Genes Required for Salmonella enterica Proliferation, Operon Prediction, Inhibition of Proliferation and Cell-Based Assays

[0883] Genes required for proliferation in Salmonella enterica are identified according to the methods described above. For example, promoters and vectors described herein can be used to identify proliferation required genes. Operons which comprise one or more of the above-identified, proliferation-required genes are predicted using the operon prediction methods described herein. An antisense nucleic acid that is complementary to at least a portion of a predicted proliferation-required operon is provided to the cell thereby inhibiting proliferation. Because the antisense nucleic acid can be produced at levels that range from lethal to sublethal, inhibition of proliferation can be either complete or partial. If proliferation of the cell is only partially inhibited, the cell becomes sensitized. Sensitized cells are contacted with compounds present in a library of compounds. A further reduction in the proliferation of the sensitized cell after being contacted with the compound indicates that the compound possesses the ability to inhibit cellular proliferation.

### Example 69

### Identification of Genes Required for Salmonella cholerasuis Proliferation, Operon Prediction, Inhibition of Proliferation and Cell-Based Assays

[0884] Genes required for proliferation in Salmonella cholerasuis are identified according to the methods described above. For example, promoters and vectors described herein can be used to identify proliferation required genes. Operons which comprise one or more of the above-identified, proliferation-required genes are predicted using the operon prediction methods described herein. An antisense nucleic acid that is complementary to at least a portion of a predicted proliferation-required operon is provided to the cell thereby inhibiting proliferation. Because the antisense nucleic acid can be produced at levels that range from lethal to sublethal, inhibition of proliferation can be either complete or partial. If proliferation of the cell is only partially inhibited, the cell becomes sensitized. Sensitized cells are contacted with compounds present in a library of compounds. A further reduction in the proliferation of the sensitized cell after being contacted with the compound indicates that the compound possesses the ability to inhibit cellular proliferation.

### Example 70

### Identification of Genes Required for Brucella abortus Proliferation, Operon Prediction, Inhibition of Proliferation and Cell-Based Assays

[0885] Genes required for proliferation in Brucella abortus are identified according to the methods described above. For example, promoters and vectors described herein can be used to identify proliferation required genes. Operons which comprise one or more of the above-identified, proliferation-required genes are predicted using the operon prediction methods described herein. An antisense nucleic acid that is complementary to at least a portion of a predicted proliferation-required operon is provided to the cell thereby inhibiting proliferation. Because the antisense nucleic acid can be produced at levels that range from lethal to sublethal, inhibition of proliferation can be either complete or partial. If proliferation of the cell is only partially inhibited, the cell becomes sensitized. Sensitized cells are contacted with compounds present in a library of compounds. A further reduction in the proliferation of the sensitized cell after being contacted with the compound indicates that the compound possesses the ability to inhibit cellular proliferation.

### Example 71

### Identification of Genes Required for Brucella melitensis Proliferation, Operon Prediction, Inhibition of Proliferation and Cell-Based Assays

[0886] Genes required for proliferation in Brucella melitensis are identified according to the methods described above. For example, promoters and vectors described herein can be used to identify proliferation required genes. Operons which comprise one or more of the above-identified, proliferation-required genes are predicted using the operon prediction methods described herein. An antisense nucleic acid that is complementary to at least a portion of a predicted proliferation-required operon is provided to the cell thereby inhibiting proliferation. Because the antisense nucleic acid can be produced at levels that range from lethal to sublethal, inhibition of proliferation can be either complete or partial. If proliferation of the cell is only partially inhibited, the cell becomes sensitized. Sensitized cells are contacted with compounds present in a library of compounds. A further reduction in the proliferation of the sensitized cell after being contacted with the compound indicates that the compound possesses the ability to inhibit cellular proliferation.

### Example 72

### Identification of Genes Required for Coxiella burnetii Proliferation, Operon Prediction, Inhibition of Proliferation and Cell-Based Assays

[0887] Genes required for proliferation in Coxiella burnetii are identified according to the methods described above. For example, promoters and vectors described herein can be used to identify proliferation required genes. Operons which comprise one or more of the above-identified, proliferation-required genes are predicted using the operon prediction methods described herein. An antisense nucleic acid that is complementary to at least a portion of a predicted proliferation-required operon is provided to the cell thereby inhibiting proliferation. Because the antisense nucleic acid can be produced at levels that range from lethal to sublethal, inhibition of proliferation can be either complete or partial. If proliferation of the cell is only partially inhibited, the cell becomes sensitized. Sensitized cells are contacted with compounds present in a library of compounds. A further reduction in the proliferation of the sensitized cell after being contacted with the compound indicates that the compound possesses the ability to inhibit cellular proliferation.

### Example 73

### Identification of Genes Required for Francisella tularensis Proliferation, Operon Prediction, Inhibition of Proliferation and Cell-Based Assays

[0888] Genes required for proliferation in Francisella tularensis are identified according to the methods described above. For example, promoters and vectors described herein can be used to identify proliferation required genes. Operons which comprise one or more of the above-identified, proliferation-required genes are predicted using the operon prediction methods described herein. An antisense nucleic acid that is complementary to at least a portion of a predicted proliferation-required operon is provided to the cell thereby inhibiting proliferation. Because the antisense nucleic acid can be produced at levels that range from lethal to sublethal, inhibition of proliferation can be either complete or partial. If proliferation of the cell is only partially inhibited, the cell becomes sensitized. Sensitized cells are contacted with compounds present in a library of compounds. A further reduction in the proliferation of the sensitized cell after being contacted with the compound indicates that the compound possesses the ability to inhibit cellular proliferation.

### Example 74

### Identification of Genes Required for Rickettsia rickettsii Proliferation, Operon Prediction, Inhibition of Proliferation and Cell-Based Assays

[0889] Genes required for proliferation in Rickettsia rickettsii are identified according to the methods described above. For example, promoters and vectors described herein can be used to identify proliferation required genes. Operons which comprise one or more of the above-identified, proliferation-required genes are predicted using the operon prediction methods described herein. An antisense nucleic acid that is complementary to at least a portion of a predicted proliferation-required operon is provided to the cell thereby inhibiting proliferation. Because the antisense nucleic acid can be produced at levels that range from lethal to sublethal, inhibition of proliferation can be either complete or partial. If proliferation of the cell is only partially inhibited, the cell becomes sensitized. Sensitized cells are contacted with compounds present in a library of compounds. A further reduction in the proliferation of the sensitized cell after being contacted with the compound indicates that the compound possesses the ability to inhibit cellular proliferation.

### Example 75

### Identification of Genes Required for Rochalimaea quintana Proliferation, Operon Prediction, Inhibition of Proliferation and Cell-Based Assays

[0890] Genes required for proliferation in Rochalimaea quintana are identified according to the methods described above. For example, promoters and vectors described herein can be used to identify proliferation required genes. Operons which comprise one or more of the above-identified, proliferation-required genes are predicted using the operon prediction methods described herein. An antisense nucleic acid that is complementary to at least a portion of a predicted proliferation-required operon is provided to the cell thereby inhibiting proliferation. Because the antisense nucleic acid can be produced at levels that range from lethal to sublethal, inhibition of proliferation can be either complete or partial. If proliferation of the cell is only partially inhibited, the cell becomes sensitized. Sensitized cells are contacted with compounds present in a library of compounds. A further reduction in the proliferation of the sensitized cell after being contacted with the compound indicates that the compound possesses the ability to inhibit cellular proliferation.

[0891] Use of Antisense Nucleic Acids as Therapeutics

[0892] In addition to using antisense nucleic acids that are complementary to at least a portion of a proliferation-required operon to enable screening of molecule libraries to identify compounds useful to identify antibiotics, these antisense nucleic acids can be used as therapeutic agents. Specifically, the antisense nucleic acids complementary to at least a portion of a proliferation-required operon that has been identified by using the operon prediction methods described herein, including antisense nucleic acids complementary to at least a portion of a proliferation-required operon comprising a nucleotide sequence selected from the group consisting of SEQ ID NOs: 1-194, can be provided to an individual to inhibit the translation of one or more bacterial target genes.

### Example 76

### Generation of Antisense Therapeutics from Predicted Operons

[0893] Antisense nucleic acids complementary to at least a portion of a proliferation-required operon that has been identified by using the operon prediction methods described herein, including antisense nucleic acids complementary to at least a portion of a proliferation-required operon comprising a nucleotide sequence selected from the group consisting of SEQ ID NOs: 1-194, can be used as antisense therapeutics for the treatment of bacterial infections or simply for inhibition of bacterial growth in vitro or in vivo. For example, the antisense therapeutics may be used to treat bacterial infections caused by Acinetobacter baumannii, Anaplasma marginale, Bacillus anthracis, Bacteroides fragilis, Bordetella pertussis, Borrelia burgdorferi, Brucella abortus, Brucella melitensis, Burkholderia cepacia, Burkholderia fungorum, Burkholderia mallei, Campylobacter jejuni, Chlamydia pneumoniae, Chlamydia trachomatis, Clostridium acetobutylicum, Clostridium botulinum, Clostridium difficile, Clostridium perfringens, Corynebacterium diptheriae, Coxiella burnetii, Enterobacter cloacae, Enterococcus faecalis, Enterococcus faecium, Escherichia coli, Francisella tularensis, Haemophilus influenzae, Helicobacter pylori, Klebsiella pneumoniae, Legionella pneumophila, Listeria monocytogenes, Moraxella catarrhalis, Mycobacterium avium, Mycobacterium bovis, Mycobacterium leprae, Mycobacterium tuberculosis, Mycoplasma genitalium, Mycoplasma pneumoniae, Neisseria gonorrhoeae, Neisseria meningitidis, Nocardia asteroides, Pasteurella haemolytica, Pasteurella multocida, Proteus mirabilis, Proteus vulgaris, Pseudomonas aeruginosa, Pseudomonas putida, Pseudomonas syringae, Rickettsia rickettsii, Rochalimaea quintana, Salmonella bongori, Salmonella cholerasuis, Salmonella enterica, Salmonella paratyphi, Salmonella typhi, Salmonella typhimurium, Shigella boydii, Shigella dysenteriae, Shigella flexneri, Shigella sonnei, Staphylococcus aureus, Staphylococcus epidermidis, Staphylococcus haemolyticus, Streptococcus pneumoniae, Streptococcus mutans, Streptococcus pyogenes, Treponema pallidum, Ureaplasma urealyticum, Vibrio cholerae, Vibrio parahaemolyticus, Vibrio vulnificans, Yersinia enterocolitica, Yersinia pestis or any species falling within the genera of any of the above species.

[0894] The therapy exploits the biological process in cells where genes are transcribed into messenger RNA (mRNA) that is then translated into proteins. Antisense RNA technology contemplates the use of antisense nucleic acids, including antisense oligonucleotides, complementary to at least a portion of a proliferation-required operon that comprises a target gene, that will bind to the operon or a transcript thereof thereby decreasing or inhibiting the expression of the target gene. For example, the antisense nucleic acid may inhibit the translation or transcription of the target nucleic acid. In one embodiment, antisense oligonucleotides can be used to treat and control a bacterial infection of a cell culture containing a population of desired cells contaminated with bacteria. In another embodiment, the antisense oligonucleotides can be used to treat an organism with a bacterial infection.

[0895] Antisense oligonucleotides can be synthesized that are complementary to portions of any of the operon sequences of the present invention using methods well known in the art. In a preferred embodiment, antisense oligonucleotides are synthesized using artificial means. Uhlmann & Peymann, Chemical Rev. 90:543-584 (1990) review antisense oligonucleotide technology in detail. Modified or unmodified antisense oligonucleotides can be used as therapeutic agents. Modified antisense oligonucleotides are preferred. Modification of the phosphate backbones of the antisense oligonucleotides can be achieved by substituting the internucleotide phosphate residues with methylphosphonates, phosphorothioates, phosphoramidates, and phosphate esters. Nonphosphate internucleotide analogs such as siloxane bridges, carbonate brides, thioester bridges, as well as many others known in the art may also be used. The preparation of certain antisense oligonucleotides with modified internucleotide linkages is described in U.S. Pat. No. 5,142,047, the disclosure of which is incorporated herein by reference in its entirety.

[0896] Modifications to the nucleoside units of the antisense oligonucleotides are also contemplated. These modifications can increase the half-life and increase cellular rates of uptake for the oligonucleotides in vivo. For example, α-anomeric nucleotide units and modified nucleotides such as 1,2-dideoxy-d-ribofuranose, 1,2-dideoxy-1-phenylribofuranose, and N⁴, N⁴-ethano-5-methyl-cytosine are contemplated for use in the present invention.

[0897] An additional form of modified antisense molecules is found in peptide nucleic acids. Peptide nucleic acids (PNA) have been developed to hybridize to single and double stranded nucleic acids. PNA are nucleic acid analogs in which the entire deoxyribose-phosphate backbone has been exchanged with a chemically different, but structurally homologous, polyamide (peptide) backbone containing 2-aminoethyl glycine units. Unlike DNA, which is highly negatively charged, the PNA backbone is neutral. Therefore, there is much less repulsive energy between complementary strands in a PNA-DNA hybrid than in the comparable DNA-DNA hybrid, and consequently they are much more stable. PNA can hybridize to DNA in either a Watson/Crick or Hoogsteen fashion (Demidov et al., Proc. Natl. Acad. Sci. U.S.A. 92:2637-2641, 1995; Egholm, Nature 365:566-568, 1993; Nielsen et al., Science 254:1497-1500, 1991; Dueholm et al., New J. Chem. 21:19-31, 1997).

[0898] Molecules called PNA “clamps” have been synthesized which have two identical PNA sequences joined by a flexible hairpin linker containing three 8-amino-3,6-dioxaoctanoic acid units. When a PNA clamp is mixed with a complementary homopurine or homopyrimidine DNA target sequence, a PNA-DNA-PNA triplex hybrid can form which has been shown to be extremely stable (Bentin et al., Biochemistry 35:8863-8869, 1996; Egholm et al., Nucleic Acids Res. 23:217-222, 1995; Griffith et al., J. Am. Chem. Soc. 117:831-832, 1995).

[0899] The sequence-specific and high affinity duplex and triplex binding of PNA have been extensively described (Nielsen et al., Science 254:1497-1500, 1991; Egholm et al., J. Am. Chem. Soc. 114:9677-9678, 1992; Egholm et al., Nature 365:566-568, 1993; Almarsson et al., Proc. Natl. Acad. Sci. U.S.A. 90:9542-9546, 1993; Demidov et al., Proc. Natl. Acad. Sci. U.S.A. 92:2637-2641, 1995). They have also been shown to be resistant to nuclease and protease digestion (Demidov et al., Biochem. Pharm. 48:1010-1313, 1994). PNA has been used to inhibit gene expression (Hanvey et al., Science 258:1481-1485,1992; Nielsen et al., Nucl. Acids. Res., 21:197-200, 1993; Nielsen et al., Gene 149:139-145, 1994; Good & Nielsen, Science, 95: 2073-2076, 1998; all of which are hereby incorporated by reference), to block restriction enzyme activity (Nielsen et al., supra., 1993), to act as an artificial transcription promoter (Mollegaard, Proc. Natl. Acad. Sci. U.S.A. 91:3892-3895, 1994) and as a pseudo restriction endonuclease (Demidov et al., Nucl. Acids. Res. 21:2103-2107, 1993). Recently, PNA has also been shown to have antiviral and antitumoral activity mediated through an antisense mechanism (Norton, Nature Biotechnol., 14:615-619, 1996; Hirschman et al., J. Investig. Med. 44:347-351, 1996). PNAs have been linked to various peptides in order to promote PNA entry into cells (Basu et al., Bioconj. Chem. 8:481-488, 1997; Pardridge et al., Proc. Natl. Acad. Sci. U.S.A. 92:5592-5596, 1995).

[0900] The antisense oligonucleotides contemplated by the present invention can be administered by direct application of oligonucleotides to a target using standard techniques well known in the art. The antisense oligonucleotides can be generated within the target using a plasmid, or a phage. Alternatively, the antisense nucleic acid may be expressed from a sequence in the chromosome of the target cell. For example, a promoter may be introduced into the chromosome of the target cell near the target gene such that the promoter directs the transcription of the antisense nucleic acid. Alternatively, a nucleic acid containing the antisense sequence operably linked to a promoter may be introduced into the chromosome of the target cell. It is further contemplated that the antisense oligonucleotides are incorporated in a ribozyme sequence to enable the antisense to specifically bind and cleave its target mRNA. For technical applications of ribozyme and antisense oligonucleotides see Rossi et al., Pharmacol. Ther. 50(2):245-254, (1991), which is hereby incorporated by reference. The present invention also contemplates using a retron to introduce an antisense oligonucleotide to a cell. Retron technology is exemplified by U.S. Pat. No. 5,405,775, which is hereby incorporated by reference. Antisense oligonucleotides can also be delivered using liposomes or by electroporation techniques which are well known in the art.

[0901] The antisense nucleic acids described above can also be used to design antibiotic compounds comprising nucleic acids which function by intracellular triple helix formation. Triple helix oligonucleotides are used to inhibit transcription from a genome. The antisense nucleic acids can be used to inhibit cell or microorganism gene expression in individuals infected with such microorganisms or containing such cells. Traditionally, homopurine sequences were considered the most useful for triple helix strategies. However, homopyrimidine sequences can also inhibit gene expression. Such homopyrimidine oligonucleotides bind to the major groove at homopurine:homopyrimidine sequences. Thus, both types of sequences based on sequences complementary to operons identified from Acinetobacter baumannii, Anaplasma marginale, Bacillus anthracis, Bacteroides fragilis, Bordetella pertussis, Borrelia burgdorferi, Brucella abortus, Brucella melitensis, Burkholderia cepacia, Burkholderia fungorum, Burkholderia mallei, Campylobacter jejuni, Chlamydia pneumoniae, Chlamydia trachomatis, Clostridium acetobutylicum, Clostridium botulinum, Clostridium difficile, Clostridium perfringens, Corynebacterium diptheriae, Coxiella burnetii, Enterobacter cloacae, Enterococcus faecalis, Enterococcus faecium, Escherichia coli, Francisella tularensis, Haemophilus influenzae, Helicobacter pylori, Klebsiella pneumoniae, Legionella pneumophila, Listeria monocytogenes, Moraxella catarrhalis, Mycobacterium avium, Mycobacterium bovis, Mycobacterium leprae, Mycobacterium tuberculosis, Mycoplasma genitalium, Mycoplasma pneumoniae, Neisseria gonorrhoeae, Neisseria meningitidis, Nocardia asteroides, Pasteurella haemolytica, Pasteurella multocida, Proteus mirabilis, Proteus vulgaris, Pseudomonas aeruginosa, Pseudomonas putida, Pseudomonas syringae, Rickettsia rickettsii, Rochalimaea quintana, Salmonella bongori, Salmonella cholerasuis, Salmonella enterica, Salmonella paratyphi, Salmonella typhi, Salmonella typhimurium, Shigella boydii, Shigella dysenteriae, Shigellaflexneri, Shigella sonnei, Staphylococcus aureus, Staphylococcus epidermidis, Staphylococcus haemolyticus, Streptococcus pneumoniae, Streptococcus mutans, Streptococcus pyogenes, Treponema pallidum, Ureaplasma urealyticum, Vibrio cholerae, Vibrio parahaemolyticus, Vibrio vulnificans, Yersinia enterocolitica, Yersinia pestis or any species falling within the genera of any of the above species are contemplated for use as antibiotic compound templates.

[0902] The antisense nucleic acids, such as antisense oligonucleotides, which are complementary to at least a portion of a proliferation-required operon identified using the operon prediction methods described herein from Acinetobacter baumannii, Anaplasma marginale, Bacillus anthracis, Bacteroides fragilis, Bordetella pertussis, Borrelia burgdorferi, Brucella abortus, Brucella melitensis, Burkholderia cepacia, Burkholderia fungorum, Burkholderia mallei, Campylobacter jejuni, Chlamydia pneumoniae, Chlamydia trachomatis, Clostridium acetobutylicum, Clostridium botulinum, Clostridium difficile, Clostridium perfringens, Corynebacterium diptheriae, Coxiella burnetii, Enterobacter cloacae, Enterococcus faecalis, Enterococcus faecium, Escherichia coli, Francisella tularensis, Haemophilus influenzae, Helicobacter pylori, Klebsiella pneumoniae, Legionella pneumophila, Listeria monocytogenes, Moraxella catarrhalis, Mycobacterium avium, Mycobacterium bovis, Mycobacterium leprae, Mycobacterium tuberculosis, Mycoplasma genitalium, Mycoplasma pneumoniae, Neisseria gonorrhoeae, Neisseria meningitidis, Nocardia asteroides, Pasteurella haemolytica, Pasteurella multocida, Proteus mirabilis, Proteus vulgaris, Pseudomonas aeruginosa, Pseudomonas putida, Pseudomonas syringae, Rickettsia rickettsii, Rochalimaea quintana, Salmonella bongori, Salmonella cholerasuis, Salmonella enterica, Salmonella paratyphi, Salmonella typhi, Salmonella typhimurium, Shigella boydii, Shigella dysenteriae, Shigellaflexneri, Shigella sonnei, Staphylococcus aureus, Staphylococcus epidermidis, Staphylococcus haemolyticus, Streptococcus pneumoniae, Streptococcus mutans, Streptococcus pyogenes, Treponema pallidum, Ureaplasma urealyticum, Vibrio cholerae, Vibrio parahaemolyticus, Vibrio vulnificans, Yersinia enterocolitica, Yersinia pestis or any species falling within the genera of any of the above species can be used to induce bacterial cell death or at least bacterial stasis by inhibiting target nucleic acid transcription or translation. Antisense oligonucleotides complementary to about 8 to 40 nucleotides of the proliferation-required operons, including the operons comprising a nucleotide sequence selected from the group consisting of SEQ ID NOs: 1-194, have sufficient complementarity to form a duplex with the proliferation operon comprising the one or more target genes under physiological conditions.

[0903] To kill bacterial cells or inhibit their growth, the antisense oligonucleotides are applied to the bacteria or to the target cells under conditions that facilitate their uptake. These conditions include sufficient incubation times of cells and oligonucleotides so that the antisense oligonucleotides are taken up by the cells. In one embodiment, an incubation period of 7-10 days is sufficient to kill bacteria in a sample. An optimum concentration of antisense oligonucleotides is selected for use.

[0904] The concentration of antisense oligonucleotides to be used can vary depending on the type of bacteria sought to be controlled, the nature of the antisense oligonucleotide to be used, and the relative toxicity of the antisense oligonucleotide to the desired cells in the treated culture. Antisense oligonucleotides can be introduced to cell samples at a number of different concentrations preferably between 1×10⁻¹⁰M to 1×10⁻⁴M. Once the minimum concentration that can adequately control gene expression is identified, the optimized dose is translated into a dosage suitable for use in vivo. For example, an inhibiting concentration in culture of 1×10⁻⁷ translates into a dose of approximately 0.6 mg/kg body weight. Levels of oligonucleotide approaching 100 mg/kg body weight or higher may be possible after testing the toxicity of the oligonucleotide in laboratory animals. It is additionally contemplated that cells from the subject are removed, treated with the antisense oligonucleotide, and reintroduced into the subject. This range is merely illustrative and one of skill in the art are able to determine the optimal concentration to be used in a given case.

[0905] After the bacterial cells have been killed or controlled in a desired culture, the desired cell population may be used for other purposes.

### Example 77

### Use of Antisense Oligonucleotides to Treat Infections

[0906] A subject suffering from an infection with Staphylococcus aureus is treated with the antisense oligonucleotide preparation described above wherein the antisense preparation comprises an antisense or antisense analog that is complementary to at least a portion of an operon comprising a nucleotide sequence selected from the group consisting of SEQ ID NOs: 1-194.

[0907] It will be appreciated that subject suffering from an infection with Staphylococcus aureus can be treated with the antisense oligonucleotide preparation described above wherein the antisense preparation comprises an antisense or antisense analog that is complementary to at least a portion of an operon comprising a nucleotide sequence selected from the group consisting of SEQ ID NOs: 1-194, wherein the portion does not include a nucleotide sequence selected from the group consisting of SEQ ID NOs: 201-550.

[0908] It will be appreciated that subject suffering from an infection with Acinetobacter baumannit, Anaplasma marginale, Bacillus anthracis, Bacteroides fragilis, Bordetella pertussis, Borrelia burgdorferi, Brucella abortus, Brucella melitensis, Burkholderia cepacia, Burkholderia fungorum, Burkholderia mallei, Campylobacter jejuni, Chlamydia pneumoniae, Chlamydia trachomatis, Clostridium acetobutylicum, Clostridium botulinum, Clostridium difficile, Clostridium perfringens, Corynebacterium diptheriae, Coxiella burnetii, Enterobacter cloacae, Enterococcus faecalis, Enterococcus faecium, Escherichia coli, Francisella tularensis, Haemophilus influenzae, Helicobacter pylori, Klebsiella pneumoniae, Legionella pneumophila, Listeria monocytogenes, Moraxella catarrhalis, Mycobacterium avium, Mycobacterium bovis, Mycobacterium leprae, Mycobacterium tuberculosis, Mycoplasma genitalium, Mycoplasma pneumoniae, Neisseria gonorrhoeae, Neisseria meningitidis, Nocardia asteroides, Pasteurella haemolytica, Pasteurella multocida, Proteus mirabilis, Proteus vulgaris, Pseudomonas aeruginosa, Pseudomonas putida, Pseudomonas syringae, Rickettsia rickettsit, Rochalimaea quintana, Salmonella bongori, Salmonella cholerasuis, Salmonella enterica, Salmonella paratyphi, Salmonella typhi, Salmonella typhimurium, Shigella boydii, Shigella dysenteriae, Shigella flexneri, Shigella sonnei, Staphylococcus aureus, Staphylococcus epidermidis, Staphylococcus haemolyticus, Streptococcus pneumoniae, Streptococcus mutans, Streptococcus pyogenes, Treponema pallidum, Ureaplasma urealyticum, Vibrio cholerae, Vibrio parahaemolyticus, Vibrio vulnificans, Yersinia enterocolitica, Yersinia pestis or any species falling within the genera of any of the above species can be treated with the antisense oligonucleotide preparation described above wherein the antisense preparation comprises an antisense or antisense analog that is complementary to at least a portion of an operon comprising a nucleotide sequence selected from the group consisting of SEQ ID NOs: 1-194

[0909] It also will be appreciated that a subject suffering from an infection with Acinetobacter baumannit, Anaplasma marginale, Bacillus anthracis, Bacteroides fragilis, Bordetella pertussis, Borrelia burgdorferi, Brucella abortus, Brucella melitensis, Burkholderia cepacia, Burkholderia fungorum, Burkholderia mallei, Campylobacter jejuni, Chlamydia pneumoniae, Chlamydia trachomatis, Clostridium acetobutylicum, Clostridium botulinum, Clostridium difficile, Clostridium perfringens, Corynebacterium diptheriae, Coxiella burnetii, Enterobacter cloacae, Enterococcus faecalis, Enterococcus faecium, Escherichia coli, Francisella tularensis, Haemophilus influenzae, Helicobacter pylori, Klebsiella pneumoniae, Legionella pneumophila, Listeria monocytogenes, Moraxella catarrhalis, Mycobacterium avium, Mycobacterium bovis, Mycobacterium leprae, Mycobacterium tuberculosis, Mycoplasma genitalium, Mycoplasma pneumoniae, Neisseria gonorrhoeae, Neisseria meningitidis, Nocardia asteroides, Pasteurella haemolytica, Pasteurella multocida, Proteus mirabilis, Proteus vulgaris, Pseudomonas aeruginosa, Pseudomonas putida, Pseudomonas syringae, Rickettsia rickettsii, Rochalimaea quintana, Salmonella bongori, Salmonella cholerasuis, Salmonella enterica, Salmonella paratyphi, Salmonella typhi, Salmonella typhimurium, Shigella boydii, Shigella dysenteriae, Shigella flexneri, Shigella sonnei, Staphylococcus aureus, Staphylococcus epidermidis, Staphylococcus haemolyticus, Streptococcus pneumoniae, Streptococcus mutans, Streptococcus pyogenes, Treponema pallidum, Ureaplasma urealyticum, Vibrio cholerae, Vibrio parahaemolyticus, Vibrio vulnificans, Yersinia enterocolitica, Yersinia pestis or any species falling within the genera of any of the above species which contains an operon which comprises a gene that is homologous to a gene selected from the group consisting of SEQ ID NOs: 201-550 or a gene that encodes a polypeptide that is homologous to a polypeptide having an amino acid sequence selected from the group consisting of SEQ ID NOs: 551-824 can be treated with an antisense preparation described above wherein the antisense preparation comprises an antisense or antisense analog that is complementary to at least a portion of the operon that comprises the proliferation-required gene.

[0910] The antisense oligonucleotide is provided in a pharmaceutically acceptable carrier at a concentration effective to inhibit the transcription or translation of the target nucleic acid. The present subject is treated with a concentration of antisense oligonucleotide sufficient to achieve a blood concentration of about 0.1-100 micromolar. The patient receives daily injections of antisense oligonucleotide to maintain this concentration for a period of 1 week. At the end of the week a blood sample is drawn and analyzed for the presence or absence of the organism using standard techniques well known in the art. There is no detectable evidence of Acinetobacter baumannii, Anaplasma marginale, Bacillus anthracis, Bacteroides fragilis, Bordetella pertussis, Borrelia burgdorferi, Brucella abortus, Brucella melitensis, Burkholderia cepacia, Burkholderia fungorum, Burkholderia mallei, Campylobacter jejuni, Chlamydia pneumoniae, Chlamydia trachomatis, Clostridium acetobutylicum, Clostridium botulinum, Clostridium difficile, Clostridium perfringens, Corynebacterium diptheriae, Coxiella burnetii, Enterobacter cloacae, Enterococcus faecalis, Enterococcus faecium, Escherichia coli, Francisella tularensis, Haemophilus influenzae, Helicobacter pylori, Klebsiella pneumoniae, Legionella pneumophila, Listeria monocytogenes, Moraxella catarrhalis, Mycobacterium avium, Mycobacterium bovis, Mycobacterium leprae, Mycobacterium tuberculosis, Mycoplasma genitalium, Mycoplasma pneumoniae, Neisseria gonorrhoeae, Neisseria meningitidis, Nocardia asteroides, Pasteurella haemolytica, Pasteurella multocida, Proteus mirabilis, Proteus vulgaris, Pseudomonas aeruginosa, Pseudomonas putida, Pseudomonas syringae, Rickettsia rickettsii, Rochalimaea quintana, Salmonella bongori, Salmonella cholerasuis, Salmonella enterica, Salmonella paratyphi, Salmonella typhi, Salmonella typhimurium, Shigella boydii, Shigella dysenteriae, Shigella flexneri, Shigella sonnei, Staphylococcus aureus, Staphylococcus epidermidis, Staphylococcus haemolyticus, Streptococcus pneumoniae, Streptococcus mutans, Streptococcus pyogenes, Treponema pallidum, Ureaplasma urealyticum, Vibrio cholerae, Vibrio parahaemolyticus, Vibrio vulnificans, Yersinia enterocolitica, Yersinia pestis or any species falling within the genera of any of the above species and the treatment is terminated.

### Example 78

### Preparation and Use of Triple Helix Forming Oligonucleotides

[0911] The above-described antisense nucleic acids are scanned to identify 10-mer to 20-mer homopyrimidine or homopurine stretches that could be used in triple-helix based strategies for inhibiting gene expression. Following identification of candidate homopyrirmidine or homopurine stretches, their efficiency in inhibiting gene expression is assessed by introducing varying amounts of oligonucleotides containing the candidate sequences into a population of bacterial cells that normally express the target gene. The oligonucleotides may be prepared on an oligonucleotide synthesizer or they may be purchased commercially from a company specializing in custom oligonucleotide synthesis.

[0912] The oligonucleotides can be introduced into the cells using a variety of methods known to those skilled in the art, including but not limited to calcium phosphate precipitation, DEAE-Dextran, electroporation, liposome-mediated transfection or native uptake.

[0913] Treated cells are monitored for a reduction in proliferation using techniques such as monitoring growth levels as compared to untreated cells using optical density measurements. The oligonucleotides that are effective in inhibiting gene expression in cultured cells can then be introduced in vivo using the techniques well known in that art at a dosage level shown to be effective.

[0914] In some embodiments, the natural (beta) anomers of the oligonucleotide units can be replaced with alpha anomers to render the oligonucleotide more resistant to nucleases. Further, an intercalating agent such as ethidium bromide, or the like, can be attached to the 3′ end of the alpha oligonucleotide to stabilize the triple helix. For information on the generation of oligonucleotides suitable for triple helix formation see Griffin et al. (Science 245:967-971 (1989), the disclosure of which is incorporated herein by reference in its entirety).

[0915] It will be appreciated that no matter how detailed the foregoing appears in text, the invention can be practiced in many ways. As is also stated above, it should further be noted that the use of particular terminology when describing certain features or aspects of the present invention should not be taken to imply that the broadest reasonable meaning of such terminology is not intended, or that the terminology is being re-defined herein to be restricted to including any specific characteristics of the features or aspects of the invention with which that terminology is associated. Thus, although this invention has been described in terms of certain preferred embodiments, other embodiments which will be apparent to those of ordinary skill in the art in view of the disclosure herein are also within the scope of this invention. Accordingly, the scope of the invention is intended to be defined only by reference to the appended claims and any equivalents thereof. All documents cited herein are incorporated herein by reference in their entireties

1. A method for predicting operons, the method comprising:
identifying consecutive genes within at least a portion of a target prokaryotic organism's genome;
determining each gene's orientation in the genome relative to its flanking genes;
segregating the genes into a plurality of bins on the basis of their orientation such that consecutive genes in the same orientation are grouped into the same bin;
performing a composite operon prediction analysis comprising pairing each gene within a selected bin with its respective flanking genes and associating a confidence score with each gene pair, wherein the confidence score reflects the likelihood that a selected gene pair resides in the same operon using the criteria of orientation and the application of at least one operon prediction method;
determining operon boundaries by identifying gene pairs having confidence scores that fall below a selected threshold; and
associating genes contained between operon boundaries as putative operons.

2. The method of claim 1, wherein the target prokaryotic organism is selected from the group consisting of Acinetobacter baumannii, Anaplasma marginale, Bacillus anthracis, Bacteroides fragilis, Bordetella pertussis, Borrelia burgdorferi, Brucella abortus, Brucella melitensis, Burkholderia cepacia, Burkholderia fungorum, Burkholderia mallei, Campylobacter jejuni, Chlamydia pneumoniae, Chlamydia trachomatis, Clostridium acetobutylicum, Clostridium botulinum, Clostridium difficile, Clostridium perfringens, Corynebacterium diptheriae, Coxiella burnetii, Enterobacter cloacae, Enterococcus faecalis, Enterococcus faecium, Escherichia coli, Francisella tularensis, Haemophilus influenzae, Helicobacter pylori, Klebsiella pneumoniae, Legionella pneumophila, Listeria monocytogenes, Moraxella catarrhalis, Mycobacterium avium, Mycobacterium bovis, Mycobacterium leprae, Mycobacterium tuberculosis, Mycoplasma genitalium, Mycoplasma pneumoniae, Neisseria gonorrhoeae, Neisseria meningitidis, Nocardia asteroides, Pasteurella haemolytica, Pasteurella multocida, Proteus mirabilis, Proteus vulgaris, Pseudomonas aeruginosa, Pseudomonas putida, Pseudomonas syringae, Rickettsia rickettsii, Rochalimaea quintana, Salmonella bongori, Salmonella cholerasuis, Salmonella enterica, Salmonella paratyphi, Salmonella typhi, Salmonella typhimurium, Shigella boydii, Shigella dysenteriae, Shigellaflexneri, Shigella sonnei, Staphylococcus aureus, Staphylococcus epidermidis, Staphylococcus haemolyticus, Streptococcus pneumoniae, Streptococcus mutans, Streptococcus pyogenes, Treponema pallidum, Ureaplasma urealyticum, Vibrio cholerae, Vibrio parahaemolyticus, Vibrio vulnificans, Yersinia enterocolitica, Yersinia pestis and any species falling within the genera of any of the above species.

3. The method of claim 1, wherein the target prokaryotic organism is Staphylococcus aureus.

4. The method of claim 1, wherein segregation of the genes into the plurality of bins further comprises identifying monocistronic operons by identifying genes where both the 5′ and 3′ flanking genes are oppositely oriented relative to the selected gene.

5. The method of claim 1, wherein segregation of the genes into the plurality of bins further comprises identifying genes having at least one 5′ or 3′ flanking gene in the same orientation.

6. The method of claim 1, wherein the results from the at least one operon prediction method are evaluated with respect to gene pair orientation and according to a pre-selected scoring criteria to determine the confidence score value associated with each gene pair.

7. The method of claim 1, wherein the at least one operon prediction method comprises an intergenic distance analysis.

8. The method of claim 1, wherein the at least one operon prediction method comprises a pairwise assessment of gene conservation.

9. The method of claim 1, wherein the at least one operon prediction method comprises a conserved gene cluster analysis.

10. The method of claim 9, wherein the conserved gene cluster analysis further comprises the steps of:
(a) identifying gene pairs contained in the bins for the target organism having an intergenic distance below a selected intergenic distance threshold;
(b) comparing the sequence and location of identified target organism gene pairs with homologous gene pairs from at least one comparison organism to identify conserved gene pairs between the target organism and the comparision organism;
(c) repeating steps (a)-(b) for each remaining comparision organism; and
(d) evaluating the conserved gene pairs between the target organism and each comparision organism with respect to one another to identify conserved gene clusters.

11. The method of claim 1, wherein the at least one operon prediction method comprises a transcriptional terminator analysis.

12. The method of claim 11, wherein the transcriptional terminator analysis further comprises:
extracting a portion of the sequence on both sides of a stop codon associated with each gene;
evaluating the portion of the sequence on both sides of the stop codon of each gene to identify prospective transcriptional terminators; and
associating a transcriptional terminator value with each gene on the basis of identified prospective transcriptional terminators.

13. The method of claim 1, wherein a numerical value is associated with the confidence score and reflects the likelihood of selected genes residing in the same operon, wherein the numerical value is selected from the group consisting of:
(a) a first numerical value which indicates that the genes of the gene pair are unlikely to be in the same operon if any of the following three criteria are met:
(i) the selected genes are in different orientations;
(ii) the intergenic distance between the selected genes is greater than approximately 300 bp; or
(iii) the intergenic distance between the selected genes is greater than 100 bp and there are no conserved gene clusters;
(b) a second numerical value which indicates that the selected genes might be in the same operon but the confidence is low if:
(i) the selected genes have an intergenic distance greater than approximately 60 bp,
(ii) the selected genes are conserved over approximately five or fewer comparison organisms, and
(iii) a predicted transcriptional terminator exists between the selected genes;
(c) a third numerical value which indicates that the selected genes are probably in the same operon if any of the following criteria are met:
(i) the selected genes are conserved in at least approximately 10 comparison organisms;
(ii) the intergenic distance between the selected genes is approximately less than or equal to 30 bp;
or if at least two of the following requirements are met:
(i) the intergenic distance between the selected genes is approximately less than or equal to 50 bp;
(ii) no predicted transcriptional terminators exist; or
(iii) the selected genes are conserved in approximately greater or equal to 5 comparison organisms but less than approximately 10 comparison organisms;
(d) a fourth numerical value which indicates that the selected genes are likely to reside in the same operon if the genes do not meet any of the above requirements.

14. A computer-based system for predicting operons within a target prokaryotic organism, the system comprising:
a database for storing information describing a plurality of genes relating to at least a portion of the target organism's genome;
a program which performs the operations of;
identifying consecutive genes from the plurality of genes stored in the database;
determining the orientation of each consecutive gene relative to its flanking genes;
segregating the consecutive genes into a plurality of bins on the basis of their orientation such that consecutive genes in the same orientation are grouped into the same bin;
performing a composite operon prediction analysis comprising pairing each consecutive gene within a selected bin with its respective flanking genes and associating a confidence score with each gene pair, wherein the confidence score reflects the likelihood that a selected gene pair resides in the same operon using the criteria of orientation and the application of at least one operon prediction method;
determining operon boundaries by identifying gene pairs having confidence scores that fall below a selected threshold; and
associating genes contained between operon boundaries as operons.

15. The system of claim 14, wherein the target prokaryotic organism is selected from the group consisting of Acinetobacter baumannii, Anaplasma marginale, Bacillus anthracis, Bacteroides fragilis, Bordetella pertussis, Borrelia burgdorferi, Brucella abortus, Brucella melitensis, Burkholderia cepacia, Burkholderia fungorum, Burkholderia mallei, Campylobacter jejuni, Chlamydia pneumoniae, Chlamydia trachomatis, Clostridium acetobutylicum, Clostridium botulinum, Clostridium difficile, Clostridium perfringens, Corynebacterium diptheriae, Coxiella burnetii, Enterobacter cloacae, Enterococcus faecalis, Enterococcus faecium, Escherichia coli, Francisella tularensis, Haemophilus influenzae, Helicobacter pylori, Klebsiella pneumoniae, Legionella pneumophila, Listeria monocytogenes, Moraxella catarrhalis, Mycobacterium avium, Mycobacterium bovis, Mycobacterium leprae, Mycobacterium tuberculosis, Mycoplasma genitalium, Mycoplasma pneumoniae, Neisseria gonorrhoeae, Neisseria meningitidis, Nocardia asteroides, Pasteurella haemolytica, Pasteurella multocida, Proteus mirabilis, Proteus vulgaris, Pseudomonas aeruginosa, Pseudomonas putida, Pseudomonas syringae, Rickettsia rickettsii, Rochalimaea quintana, Salmonella bongori, Salmonella cholerasuis, Salmonella enterica, Salmonella paratyphi, Salmonella typhi, Salmonella typhimurium, Shigella boydii, Shigella dysenteriae, Shigellaflexneri, Shigella sonnei, Staphylococcus aureus, Staphylococcus epidermidis, Staphylococcus haemolyticus, Streptococcus pneumoniae, Streptococcus mutans, Streptococcus pyogenes, Treponema pallidum, Ureaplasma urealyticum, Vibrio cholerae, Vibrio parahaemolyticus, Vibrio vulnificans, Yersinia enterocolitica, Yersinia pestis and any species falling within the genera of any of the above species.

16. The system of claim 14, wherein the target prokaryotic organism is Staphylococcus aureus.

17. The system of claim 14, wherein the program operations of segregating the consecutive genes into the plurality of bins further comprises identifying monocistronic operons by identifying genes where both the 5′ and 3′ flanking genes are oppositely oriented relative to the selected gene.

18. The system of claim 14, wherein the program operations of segregating the consecutive genes into the plurality of bins further comprises identifying genes having at least one 5′ or 3′ flanking gene in the same orientation.

19. The system of claim 14, wherein the program operations further comprises evaluating the results from the at least one operon prediction method with respect to gene pair orientation and according to a pre-selected scoring criteria to determine the confidence score value associated with each gene pair.

20. The system of claim 14, wherein the program operations of application of the at least one operon prediction method comprises performing an intergenic distance analysis.

21. The system of claim 14, wherein the program operations of application of the at least one operon prediction method comprises performing a pairwise assessment of gene conservation.

22. The system of claim 14, wherein the database further stores information describing a plurality of genes relating to at least one other comparison organism and at least one operon prediction method performed by the program comprises an a conservation analysis wherein the program further performs the operations of:
determining an intergenic distance distribution across a selected number of gene pairs stored in the database for the target organism;
determining an intergenic distance distribution for genes stored in the database relating to the at least one other comparison organism;
comparing the intergenic distance distribution across the selected number of gene pairs with that of the comparison organism; and
associating a conservation value with each gene pair on the basis of identified similarities and differences in intergenic distance distribution between the target organism and the at least one other comparison organism.

23. The system of claim 14, wherein the database further stores information describing a plurality of genes relating to at least one other comparison organism and at least one operon prediction method performed by the program comprises a conserved gene cluster analysis wherein the program further performs the operations of:
(a) identifying target organism gene pairs having an intergenic distance below a selected intergenic distance threshold;
(b) comparing the sequence and location of identified target organism gene pairs with homologous gene pairs from at least one comparison organism to identify conserved gene pairs between the target organism and the comparision organism;
(c) repeating steps (a)-(b) for each remaining comparision organism; and
(d) evaluating the conserved gene pairs between the target organism and each comparision organism with respect to one another to identify conserved gene clusters.

24. The system of claim 14, wherein the at least one operon prediction method performed by the program comprises a transcriptional terminator analysis wherein the program further performs the operations of:
extracting a portion of the sequence on both sides of a stop codon associated with each gene from the database;
evaluating the portion of the sequence on both sides of the stop codon of each gene to identify prospective transcriptional terminators; and
associating a transcriptional terminator value with each gene pair on the basis of identified prospective transcriptional terminators.

25. A computer readable medium having stored thereon instructions which cause a general purpose computer to perform the steps of:
identifying consecutive genes within at least a portion of a target prokaryotic organism's genome;
determining each gene's orientation in the genome relative to its flanking genes;
segregating the genes into a plurality of bins on the basis of their orientation such that consecutive genes in the same orientation are grouped into the same bin;
performing a composite operon prediction analysis comprising pairing each gene within a selected bin with its respective flanking genes and associating a confidence score with each gene pair, wherein the confidence score reflects the likelihood that a selected gene pair resides in the same operon using the criteria of orientation and the application of at least one operon prediction method;
determining operon boundaries by identifying gene pairs having confidence scores that fall below a selected threshold; and
associating genes contained between operon boundaries as putative operons.

26. The computer readable medium of claim 25, wherein the steps performed by the computer operate on a target prokaryotic organism selected from the group consisting of Acinetobacter baumannii, Anaplasma marginale, Bacillus anthracis, Bacteroides fragilis, Bordetella pertussis, Borrelia burgdorferi, Brucella abortus, Brucella melitensis, Burkholderia cepacia, Burkholderia fungorum, Burkholderia mallei, Campylobacter jejuni, Chlamydia pneumoniae, Chlamydia trachomatis, Clostridium acetobutylicum, Clostridium botulinum, Clostridium difficile, Clostridium perfringens, Corynebacterium diptheriae, Coxiella burnetii, Enterobacter cloacae, Enterococcus faecalis, Enterococcus faecium, Escherichia coli, Francisella tularensis, Haemophilus influenzae, Helicobacter pylori, Klebsiella pneumoniae, Legionella pneumophila, Listeria monocytogenes, Moraxella catarrhalis, Mycobacterium avium, Mycobacterium bovis, Mycobacterium leprae, Mycobacterium tuberculosis, Mycoplasma genitalium, Mycoplasma pneumoniae, Neisseria gonorrhoeae, Neisseria meningitidis, Nocardia asteroides, Pasteurella haemolytica, Pasteurella multocida, Proteus mirabilis, Proteus vulgaris, Pseudomonas aeruginosa, Pseudomonas putida, Pseudomonas syringae, Rickettsia rickettsii, Rochalimaea quintana, Salmonella bongori, Salmonella cholerasuis, Salmonella enterica, Salmonella paratyphi, Salmonella typhi, Salmonella typhimurium, Shigella boydii, Shigella dysenteriae, Shigellaflexneri, Shigella sonnei, Staphylococcus aureus, Staphylococcus epidermidis, Staphylococcus haemolyticus, Streptococcus pneumoniae, Streptococcus mutans, Streptococcus pyogenes, Treponema pallidum, Ureaplasma urealyticum, Vibrio cholerae, Vibrio parahaemolyticus, Vibrio vulnificans, Yersinia enterocolitica, Yersinia pestis and any species falling within the genera of any of the above species.

27. The computer readable medium of claim 25, wherein the steps performed by the computer operate on a target prokaryotic organism that is Staphylococcus aureus.

28. The computer readable medium of claim 25, wherein segregation of the genes into the plurality of bins further comprises identifying putative polycistronic operons comprising a gene having at least one 5′ or 3′ flanking gene in the same orientation.

29. The computer readable medium of claim 25, wherein the results from the at least one operon prediction method are evaluated with respect to gene pair orientation and according to a pre-selected scoring criteria to determine the confidence score value associated with each gene pair.

30. The computer readable medium of claim 25, wherein the at least one operon prediction method comprises a pairwise assessment of gene conservation.

31. The computer readable medium of claim 25, wherein the at least one operon prediction method comprises a conserved gene cluster analysis.

32. The computer readable medium of claim 31, wherein the conserved gene cluster analysis further comprises the steps of:
(a) identifying gene pairs contained in the bins for the target organism having an intergenic distance below a selected intergenic distance threshold;
(b) comparing the sequence and location of identified target organism gene pairs with homologous gene pairs from at least one comparison organism to identify conserved gene pairs between the target organism and the comparision organism;
(c) repeating steps (a)-(b) for each remaining comparision organism; and
(d) evaluating the conserved gene pairs between the target organism and each comparision organism with respect to one another to identify conserved gene clusters.

33. The computer readable medium of claim 25, wherein the at least one operon prediction method comprises a transcriptional terminator analysis.

34. The computer readable medium of claim 33, wherein the transcriptional terminator analysis further comprises:
extracting a portion of the sequence on both sides of a stop codon associated with each gene;
evaluating the portion of the sequence on both sides of the stop codon of each gene to identify prospective transcriptional terminators; and
associating a transcriptional terminator value with each gene on the basis of identified prospective transcriptional terminators.

35. The computer readable medium of claim 25, wherein a numerical value is associated with the confidence score and reflects the likelihood of selected genes residing in the same operon, wherein the numerical value is selected from the group consisting of:
(a) a first numerical value which indicates that the genes of the gene pair are unlikely to be in the same operon if any of the following three criteria are met:
(i) the selected genes are in different orientations;
(ii) the intergenic distance between the selected genes is greater than approximately 300 bp; or
(iii) the intergenic distance between the selected genes is greater than 100 bp and there are no conserved gene clusters;
(b) a second numerical value which indicates that the selected genes might be in the same operon but the confidence is low if:
(i) the selected genes have an intergenic distance greater than approximately 60 bp,
(ii) the selected genes are conserved over approximately five or fewer comparison organisms, and
(iii) a predicted transcriptional terminator exists between the selected genes;
(c) a third numerical value which indicates that the selected genes are probably in the same operon if any of the following criteria are met:
(i) the selected genes are conserved in at least approximately 10 comparison organisms;
(ii) the intergenic distance between the selected genes is approximately less than or equal to 30 bp;
or if at least two of the following requirements are met:
(i) the intergenic distance between the selected genes is approximately less than or equal to 50 bp;
(ii) no predicted transcriptional terminators exist; or
(iii) the selected genes are conserved in approximately greater or equal to 5 comparison organisms but less than approximately 10 comparison organisms;
(d) a fourth numerical value which indicates that the selected genes are likely to reside in the same operon if the genes do not meet any of the above requirements.

The application's sequence listing, which the Patent Office published only in electronic form, follows.

SEQUENCE LISTING (833 sequences)

SEQ ID NO: 1 - DNA, 6005 bp, Staphylococcus aureus
gtgattattttggttcaagaagttgtagtagaaggagacattaatttaggtcaatttctaaaaacagaagggattattgaatctggtggtcaagcaaaatggttcttgcaagacgttgaagtattaattaatggagtgcgtgaaacacgtcgcggtaaaaagttagaacatcaagatcgtatagatatcccagaattacctgaagatgctggttctttcttaatcattcatcaaggtgaacaatgaagttaaatacactccaattagaaaattatcgtaactatgatgaggttacgttgaaatgtcatcctgacgtgaatatcctcattggagaaaatgcacaaggaaagacaaatttacttgaatcaatttataccttagctttagcaaaaagtcatagaacgagtaatgataaggaactcatacgttttaatgctgattatgctaaaatagaaggtgagcttagttatagacacggcacgatgccattaacaatgtttataactaaaaaaggtaaacaagtcaaagtgaatcacttagagcaaagtcgtctaactcaatatattggacacctcaatgtggttctatttgcgccagaagatttgaatattgtaaaaggctctcctcaaataagacgacgctttatagatatggagttgggccaaatttctgctgtttacttaaatgatttagctcaataccaacgtattttaaagcaaaagaataattacttaaagcagttacaattaggccaaaaaaaggacttaacaatgttggaagtattaaatcagcagtttgctgaatatgcaatgaaagtaactgataaacgtgcacattttattcaagagctagagtcgttagctaaaccgattcatgctggtatcacaaatgataaagaagcgttgtcgctaaattatttacctagtcttaaatttgattatgctcaaaatgaagcggcacgacttgaagaaattatgtctattcttagcgataatatgcaaagagaaaaagaacgaggcattagcttattcggaccacatcgagatgatataagttttgatgtgaatggcatggatgctcaaacatatggttctcaaggacagcaacgtacaacggctttgtccattaaattagctgaaattgagttaatgaatatcgaagttggggaatatcccatcttattattagacgatgtactcagtgaattagatgattcgcgtcaaacgcatttattaagtacgattcagcataaagtacaaacatttgtcactacgacatctgtagatggtattgatcatgaaatcatgaataacgctaaattgtatcgtattaatcaaggtgaaattataaagtaacagaaagcgatggtgactgcattgtcagatgtaaacaacacggataattatggtgctgggcaaatacaagtattagaaggtttagaagcagtacgtaaaagaccaggtatgtatataggatcgacttcagagagaggtttgcaccatttagtgtgggaaattgtcgataatagtatcgatgaagcattagctggttatgcaaataaaattgaagttgttattgaaaaagataactggattaaagtaacggataacggacgtggtatcccagttgatattcaagaaaaaatgggacgtccagctgtcgaagttattttaactgttttacatgctggtggtaaattcggcggtggcggatacaaagtatctggtggtttacatggtgttggttcatcagttgtaaacgcattgtcacaagacttagaagtatatgtacacagaaatgagactatatatcatcaagcatataaaaaaggtgtacctcaatttgacttaaaagaagttggcacaactgataagacaggtactgtcattcgttttaaagcagatggagaaatcttcacagagacaactgtatacaactatgaaacattacagcagcgtattagagagcttgctttcttaaacaaaggaattcaaatcacattaagagatgaacgtgatgaagaaaacgttagagaagactcctatcactatgagggcggtattaaatcgtacgttgagttattgaacgaaaataaagaacctattcatgatgagccaatttatattcatcaatctaaagatgatattgaagtagaaattgcgattcaatataactcaggatatgccacaaatcttttaacttacgcaaataacattcatacgtatgaaggtggtacgcatgaagacggattcaaacgtgcattaacgcgtgtcttaaatagttatggtttaagtagcaagattatgaaagaagaaaaagatagactttctggtgaagatacacgtgaaggtatgacagcaattatatctatcaaacatggtgatcctcaattcgaaggtcaaacgaagacaaaattaggtaattctgaagtgcgtcaagttgtagataaattattctcagagcactttgaacgatttttatatgaaaatccacaagtcgcacgtacagtggttgaaaaaggtattatggcggcacgtgcacgtgttgctgcgaaaaaagcgcgtgaagtaacacgtcgtaaatcagcgttagatgtagcaagtcttccaggtaaattagccgattgctctagtaaaagtcctgaagaatgtgagattttcttagtcgaaggggactctgccggggggtctacaaaatctggtcgtgactctagaacgcaggcgattttaccattacgaggtaagatattaaatgttgaaaaagcacgattagatagaattttgaataacaatgaaattcgtcaaatgatcacagcatttggtacaggaatcggtggcgactttgatctagcgaaagcaagatatcacaaaatcgtcattatgactgatgccgatgtggatggagcgcatattagaacattgttattaacattcttctatcgatttatgagaccgttaattgaagcaggctatgtgtatattgcacagccaccgttgtataaactgacacaaggtaaacaaaagtattatgtatacaatgatagggaacttgataaacttaaatctgaattgaatccaacaccaaaatggtctattgcacgatacaaaggtcttggagaaatgaatgcagatcaattatgggaaacaacaatgaaccctgagcaccgcgctcttttacaagtaaaacttgaagatgcgattgaagcggaccaaacatttgaaatgttaatgggtgacgttgtagaaaaccgtagacaatttatagaagataatgcagtttatgcaaacttagacttctaagcgctgtgaactgaacttttgaaggaggaactcttgatggctgaattacctcaatcaagaataaatgaacgaaatattaccagtgaaatgcgtgaatcatttttagattatgcgatgagtgttatcgttgctcgtgcattgccagatgttcgtgacggtttaaaaccagtacatcgtcgtatactatatggattaaatgaacaaggtatgacaccggataaatcatataaaaaatcagcacgtatcgttggtgacgtaatgggtaaatatcaccctcatggtgacttatctatttatgaagcaatggtacgtatggctcaagatttcagttatcgttatccgcttgttgatggccaaggtaactttggttcaatggatggagatggcgcagcagcaatgcgttatactgaagcgcgtatgactaaaatcacacttgaactgttacgtgatattaataaagatacaatagattttatcgataactatgatggtaatgaaagagagccgtcagtcttacctgctcgattccctaacttgttagccaatggagcatcaggtatagcggtaggtatggcaacgaatattccaccacataacttaacagaattaatcaatggtgtacttagcttaagtaagaaccctgatatttcaattgctgagttaatggaggatattgaaggtcctgatttcccaactgctggacttattttaggtaagagtggtattagacgtgcatatgaaacaggtcgtggttcaattcaaatgcgttctcgtgcagttattgaagaacgtggaggcggacgtcaacgtattgttgtcactgaaattcctttccaagtgaataaggctcgtatgattgaaaaaattgcagagctcgttcgtgacaagaaaattgacggtatcactgatttacgtgatgaaacaagtttacgtactggtgtgcgtgtcgttattgatgtgcgtaaggatgcaaatgctagtgtcattttaaataacttatacaaacaaacacctcttcaaacatcatttggtgtgaatatgattgcacttgtaaatggtagaccgaagcttattaatttaaaagaagcgttggtacattatttagagcatcaaaagacagttgttagaagacgtacgcaatacaacttacgtaaagctaaagatcgtgcccacattttagaaggattacgtatcgcacttgaccatatcgatgaaattatttcaacgattcgtgagtcagatacagataaagttgcaatgaaaagcttgcaacaacgcttcaaactttctgaaaaacaagctcaagctattttagacatgcgtttaagacgtctaacaggtttagagagagacaaaattgaagctgaatataatgagttattaaattatattagtgaattagaaacaatcttagctgatgaagaagtattactacaattagttagagatgaattaacagaaattcgagatcgtttcggtgatgatcgtcgtactgaaatccaattaggtggatttgaagatttagaagatgaagatctcattccagaagaacaaattgtaattacactaagccataataactacattaaacgtttgccggtatctacatatcgtgctcaaaaccgtggtggtcgtggtgttcaaggtatgaatacattggaagaagattttgtcagtcaattggtaactttaagtacacatgaccatgtattgttctttactaacaaaggtcgtgtatacaaacttaaaggttatgaagtgcctgagttatcaagacagtctaaaggtattcctgtagtgaatgctattgaacttgaaaatgatgaagtcattagtacaatgattgctgttaaagaccttgaaagtgaagacaacttcttagtgtttgcaactaaacgtggtgtcgttaaacgttcagcattaagtaacttctcaagaataaatagaaatggtaagattgcgatttcgttcagagaagatgatgagttaattgcagttcgcttaacaagtggtcaagaagatatcttgattggtacatcacatgcatcattaattcgattccctgaatcaacattacgtcctttaggccgtacagcaacgggtgtgaaaggtattacacttcgtgaaggtgacgaagttgtagggcttgatgtagctcatgcaaacagtgttgatgaagtattagtagttactgaaaatggttatggtaaacgtacgccagttaatgactatcgtttatcaaatcgtggtggtaaaggtattaaaacagctacgattactgagcgtaatggtaatgttgtatgtatcactacagtaactggtgaagaagatttaatgattgttactaatgcaggtgtcattattcgactagatgttgcagatatttctcaaaatggtcgtgcagcacaaggtgttcgcttaattcgcttaggtgatgatcaatttgtttcaacggttgctaaagtaaaagaagatgcagaagatgaaacgaatgaagatgagcaatctacttcaactgtatctgaagatggtactgaacaacaacgtgaagcggttgtaaatgatgaaacaccaggaaatgcaattcatactgaagtgattgattcagaagaaaatgatgaagatggacgtattgaagtaagacaagatttcatggatcgtgttgaagaagatatacaacaatcatcagatgaagatgaagaataa

SEQ ID NO: 2 - DNA, 3885 bp, Staphylococcus aureus
atggctgtaaaaagagaagatgtaaaagccatcgtaagcgctattgggggaaaagaaaatcttgaagctgcaacgcattgtgtaacacgattacgtttagtgcttaaagatgaaagcaaagttgataaagacgcattaagtaataacgcgttggtcaaggggcagttcaaagcagaccatcaatatcaaattgtcattggtccaggaacagtcgatgaagtgtataagcagtttattgatgaaacaggtgctcaagaagcttcgaaagatgaagcgaaacaagcagctgcgaaaaaagggaatccagtacaacgtttgatcaaattgttaggggatatttttataccaatattacctgcgattgtgacagctggtttgttaatggggatcaataatttacttacaatgaaaggtttatttggtccaaaagcacttattgagatgtatccgcaaattgctgatatttcaaacatcattaatgtgattgcgagtacggcatttattttcttaccagcattaattggttggagtagtatgcgtgtatttggtggtagtccgattctaggcatagtcttaggtttgattttaatgcatccgcaattagtatctcagtatgatttggcaaaagggaatattccgacgtggaacttatttggcttagagattaagcagttgaattaccaaggtcaagtgttgcctgttttaattgcagcttatgttctagctaaaattgaaaaaggattaaataaagtcgttcacgattcgataaaaatgttggtcgttggacccgtagcgcttttagttactggatttttagcatttattatcattggaccagttgcattattgattggtacaggtattacatctggtgttacatttatattccaacatgcaggatggcttggcggagcaatatatggattgttatatgcaccacttgtaattacaggactacaccatatgtttttagcagtagatttccaattgatgggtagcagcttaggtggtacgtatttatggccaattgttgcgatttccaatatttgtcagggctctgcagcatttggagcatggtttgtctataaacgtcgtaaaatggttaaagaagaaggcttggcattaacatcttgtatttctgctatgttaggtgttactgaaccagctatgtttggtgtgaacttacctttgaaatatccatttatcgctgcgatatcaacgtcttgtgtattgggggcaatcgttggtatgaataacgtacttggaaaagttggtgttggtggcgtgccagcattcatttcaattcaaaaagaattttggccagtatatcttattgtgacagctattgctattgttgtaccatgtatactaacaattgtgatgtctcattttagtaaacaaaaagcgaaagaaattgttgaagattaataaaataaaaaaggggcgttcgttatttggacgtcctttattacgttataaggtggtaattgtgtgtcgaaagaaatagattggagaaaatccgttgtatatcaaatttatcctaagtcgtttaatgatacgacggggaatggtataggagatatcaacggaattatagaaaaattggattatatcaagttattgggtgttgattatatttggttaacaccagtgtatgaatcacctatgaatgataatggctatgatatcagcaattatttagaaatcaatgaagcctttggaacgatggatgattttgaaaagttaatcaaagttgctcatcaaaaagacttgaaagtgatgttagatattgttattaatcatacgtcgacggagcatgaatggtttaaagaagcccgtaaatctaaagataacccttatagagattattactttttcagatcatctgaagacgggccgccaacaaattggcattctaaattcggtggtaatgcatggaagtatgattctgagacagatgaatattatttacatttatttgatgtcagtcaagctgatttaaattgggataatccggaagtacgtcaatcgttatatcgcatagtcaatcattggatagacttcggcgttgatggttttcgatttgatgtcattaacttaatttctaaaggtgaatttaaggactctgacaaaataggtaaagaattttatacggatggtcctagagtgcatgagtttctgcatgaattaaatcgtcaaacgtttggtaacactgacatgatgactgtaggagaaatgtcttcgacgacgattgaaaattgtattaagtatacacaaccagaacgccaagaattgaatagtgtttttaattttcatcatctaaaggttgattatgttgatggtgaaaagtggacaaatgcgaagcttgattttcataagttaaaggaaattctgatgcaatggcaacgaggtatttatgacggtggcggatggaacgcgattttctggtgtaatcatgatcagccacgggtagtgtctagatttggtgatgatacgtcggaagagatgaggatacaaagtgctaaaatgttagctatcgcactgcatatgttgcaagggacgccatatatttaccaaggtgaagaaattggtatgacggacccacattttacatcaatagcacaatatcgtgatgttgaatcgattaatgcctaccatcagttgctaagtgaagggcatgctgaagcggatgtattagcgattttaggacagaagtcacgagacaattcgagaacgcctatgcaatggagtgatgatgttaatgctggatttacagctggtaagccttggattgatatttcggaaaattatcatcaggtcaacgttagacaagcacttcagaataaagagtctattttctatacgtatcaaaaattaatacaattaagacatacgcatgatattattacgtatggagacattgtgccacgttttatggatcatgatcatttatttgtttatgaacgtcattataagaatcaacaatggctagtaattgcgaatttctcagcatcggctgttgatttgccagaaggattggctagagaaggttgtgttgtgattcaaacaggcacagtggaaaataatacgataagcgggtttggtgcaattgtaatcgaaacaaacgcgtaaaataaattgagtggatgcgtttatatggcgaaacaaaaaaagtttatgaagatttatgaggcgttgaaagaagatatattaaacgggcagattcaatatggtgaacaaattccgtctgaacatgatttggtgcaattgtaccagtcatctcgagagaccgtgcgtaaggcattagatttgttggcattagacggcatgattcaaaagattcatggtaaagggtcacttgtcatttatcaggaggttacagagtttccattttctgaacttgttagttttaaagaaatgcaagaagaaatgggcgtcgcatatttaactgaagttgttgtgaatgaggttgttgaagcgcatgaagttccagaagttcaacatgctttaaacatcaattctagtgaatcgctcattcatattgttagaactcgtcggcttaaccaacatgtgaagattgttgatgaagattattttctaaagtcgattgtttcagatataggtaatgatgttgcgagtgattctatttatgattatttggaaaaggtattaaatcttaatattagttattcaagtaagtctattacttttgaaccgtttgatgaacaagcatatcaattgtttggtgatgtatcggtggcttattcagcaacagttcgaagtattgtgtatttagaaaatacaatgccgtttcaatataatatttcaaaacatcttgcaaatgaatttaaatttaacgacttctcaagacgtcgtataaagtaa

SEQ ID NO: 3 - DNA, 3301 bp, Staphylococcus aureus
atgcaaatatatttaagtactttaacagagttagattatgataaatctttaaatagtattgaagaaagttttgatgataatcctgaaacgagttggcaagcacgtgcgaaagtaaaacatttaagaaaatctccttgctataattttgaattagaagtaatagcgaaaaatgaaaataacgatgtcgttggacacgttttattaattgaagtagaaattaatagtgatgataagacgtattatggtttggcgattgcctctttatcagttcatcctgaattacgtggacaaaaattaggtcgtggcttggttcaagcagtagaagagcgtgccaaagcacaagagtatagtacggttgttgtagaccattgttttgactactttgaaaagttgggttatcaaaatgctgctgagcatgacattaaattagaatctggtgatgcaccgttacttgtaaaatatttatgggataatttgacggatgcaccacacggaatcgtaaaatttccagaacatttttattaattgttcaattaagaagtaaaggtattatcatgctataatgagaggtaattgtttatggaggtgctaacttgaattatcaagccttatatcgtatgtacagaccccaaagtttcgaggatgtcgtcggacaagaacatgtcacgaagacattgcgcaatgcgatttcgaaagaaaaacagtcgcatgcttatatttttagtggtccgagaggtacggggaaaacgagtattgccaaagtgtttgctaaagcaatcaactgtctaaatagcactgatggagaaccttgtaatgaatgtcatatttgtaaaggcattacgcaggggactaattcagatgtgatagaaattgatgctgctagtaataatggcgttgatgaaataagaaatattagagacaaagttaaatatgcaccaagtgaatcgaaatataaagtttatattatagatgaggtgcacatgctaacaacaggtgcttttaatgcccttttaaagacgttagaagaacctccagcacacgctatttttatattggcaacgacagaaccacataaaatccctccaacaatcatttctagggcacaacgttttgattttaaagcaattagcctagatcaaattgttgaacgtttaaaatttgtagcagatgcacaacaaattgaatgtgaagatgaagccttggcatttatcgctaaagcgtctgaagggggtatgcgtgatgcattaagtattatggatcaggctattgcatttggtgatggtacgttaacattgcaagatgcgttgaatgtcacaggtagcgtacatgatgaagcgttggatcacttgtttgatgatattgtacaaggtgacgtacaagcatcttttaaaaaataccatcagtttataacagagggtaaagaagtgaatcgcctaataaatgatatgatttattttgtcagagatacgattatgaataaaacatctgagaaagatactgagtatcgagcactgatgaacttagaattagatatgttatatcaaatgattgatcttattaatgatacattagtgtcgattcgttttagtgtgaatcaaaacgttcattttgaagtgttgttagtaaaattagctgagcagattaagggtcaaccacaagtgattgcgaatgtagctgaaccagcacaaattgcttcatcgccaaacacagatgtattgttgcaacgtatggaacagttagagcaagaattaaaaacactaaaagcacaaggagtgagtgtcgctcctgctcaaaaatcttcgaaaaagcctgcgagaggcatacaaaaatctaaaaatgcattttcaatgcaacaaattgcaaaagtgctagataaagcgaataaggcagatatcaaattgttgaaagatcattggcaagaagtgattgatcatgccaaaaacaatgataaaaaatcactcgttagtttattgcaaaattcggaacctgtggcggcaagtgaagatcacgtacttgtgaaatttgaggaagagatccattgtgaaatcgtcaataaagacgacgagaaacgtagtagtatagaaagtgttgtatgtaatatcgttaataaaaacgttaaagttgttggtgtaccatcagatcaatggcaaagagttcgaacggagtatttacaaaatcgtaaaaacgaaggcgatgatatgccaaagcaacaagcacaacaaacagatattgctcaaaaagcaaaagatcttttcggtgaagaaactgtacatgtgatagatgaagagtgatacatgacaagcgatataatcgtatgtataatgaaagaaacatcattttattgataaatatttattgattttcaaggaggaaatggaatatgcgcggtggcggaaacatgcaacaaatgatgaaacaaatgcaaaaaatgcaaaagaaaatggctcaagaacaagaaaaacttaaagaagagcgtattgtaggaacagctggcggtggcatggttgcagttactgtaactggtcataaagaagttgtcgacgttgaaatcaaagaagaagctgtagacccagacgatattgaaatgctacaagacttagtgttagcagctactaatgaagcgatgaataaagctgatgagcttactcaagaacgtttaggtaaacatactcaaggcttaaacatccctggaatgtgatcatagatgcattatccagaacctatatcaaagcttattgatagctttatgaaattgccaggcattggtccaaagacagcccaacgtctggcttttcataccttagatatgaaagaagacgatgttgttcagtttgccaaagcattagtagatgttaagagagaattaacatattgtagcgtatgtggtcacattactgaaaatgatccatgttatatttgtgaagataaacaaagagatcgttcagttatttgtgttgtggaagatgacaaagatgtcatagctatggaaaaaatgagagaatacaaaggtttatatcacgttttacatgggtctatttcacctatggatggcattggaccagaagatattaatattccttcattgattgaacgcttgaaaagcgatgaagttagcgaattaatcttagctatgaacccgaacttagagggggaatctacagccatgtatatttctagattagttaagcctataggtatcaaagtgacgagattagcacaagggttatcggtaggtggcgatttagagtatgctgacgaagtaacattatctaaagcaatcacaggtagaacagaaatgtaa

SEQ ID NO: 4 - DNA, 6703 bp, Staphylococcus aureus
atgaagcaacctattttaaataaattagaaagtttaaatcaagaagaagcgatttctttgcatgttccgggtcataaaaatatgactatcggtcatttatctcaattatcaatgacaatggataaaactgaaatacctggattagatgatttacatcatcctgaagaagtcattttggaaagtatgaagcaggtggagaaacattcagattatgatgcttatttcttagtgaatggcaccacttcaggaatattatctgtcatccagtctttttcacagaaaaaaggcgatatcttaatggcaagaaatgtacataaatctgtgttacatgcgctcgatattagccaacaagaagggcattttattgaaacgcatcaaagtccgttaacgaatcattataataaagttaatttaagccgtttgaataatgacggtcacaaacttgctgtgttgacttatcctaactattacggtgaaacatttaatgtagaagaggttatcaaatctttgcaccaattaaatattcctgtactcattgacgaagcacacggcgcgcactttggattgcaaggatttccagattctacattaaattatcaagctgactatgttgttcaatcttttcataaaacgttaccagctttaacgatgggctcggtactttatattcataaaaatgcaccttatagagaaactattatagaatatctaagctacttccaaacatctagtccttcgtatttgattatggctagtttagagtcagctgccgagttctataaaacatatgatagtaccgtgttttttgataagagagcgcaattaatcgaatgtttggagaagaagggttttgaaatgcttcaagttgatgatccgttgaagttgctgataaaatatgaaggttttacaggtcatgatattcaaaattggtttatgaatgcacatatctatttagaattagcggacgactatcaagcattagcgatattgccgttatggcatcatgatgatacgtatttatttgatttgcttttacgtaaaattgaagatatgattttaccgaaaaaatcagtttctaaagttaaacaaacacaacttttaacaactgaaggtaactataaaccaaaacgctttgaatatgttacttggtgtgatttgaaaaaggcaaaaggtaaagttctggcgcgacatattgtcccgtatccgccagggattcctattattttcaaaggagaaacaataactgaaaatatgatagaattggtaaatgaatatctggaaactggaatgatagttgaaggaattaaaaataataaaattttagttgaggatgaataaaatgtcagcttttataacttttgagggcccagaaggctctggaaaaacaactgtaattaatgaagtttaccatagattagtaaaagattatgatgtcattatgactagagaaccaggtggtgttcctactggtgaagaaatacgtaaaattgtattagaaggcaatgatatggacattagaactgaagcaatgttatttgctgcatctagaagagaacatcttgtattaaaggtcataccagctttaaaagaaggtaaggttgtgttgtgtgatcgctatatcgatagttcattagcttatcaaggttatgctagagggattggcgttgaagaagtaagagcattaaacgaatttgcaataaatggattatatccagacttgacgatttatttaaatgttagtgctgaagtaggtcgcgaacgtattattaaaaattcaagagatcaaaatagattagatcaagaagatttaaagtttcacgaaaaagtaattgaaggttaccaagaaatcattcataatgaatcacaacggttcaaaagcgttaatgcagatcaacctcttgaaaatgttgttgaagacacgtatcaaactatcatcaaatatttagaaaagatatgatataattgttagaagaggtgttataaaatgaaaatgattatagcgatcgtacaagatcaagatagtcaggaacttgcagatcaacttgttaaaaataactttagagcaacaaaattggcaacaacaggtgggtttttaagagcgggtaatacaacattcttatgtggtgtcaatgatgaccgtgtagatgaaatattgtctgtgattaatcaaacgtgtggtaatagagaacagttggtttcacctattacacctatgggaggcagtgcggattcgtacattccatatccagttgaagttgaagttggcggtgctactgtatttgttatgccagttgatgcattccatcaattttaattctataatacaatcatcaattagagatacttaaaatagtgtattaataagttattaacaattttgggttgcttgactgcgactagttcagatgccaatagatttgatttttgtggttctaaaaataatcacaaatcatggtcgctattgttgcagtaattagttgctctttggcaacctttttatataaaagcaaaagggagtttgtaatgaatggatgaacagcaacaattgacgaatgcatatcattcaaataaattatcgcatgcctatttatttgaaggtgatgatgcacaaacgatgaaacaagttgcgattaattttgcaaagcttattttatgtcaaacagatagtcaatgtgaaacaaaggttagtacatataatcatccagactttatgtatatatcaacaactgagaatgcaattaagaaagaacaagttgaacaacttgtgcgtcatatgaatcaacttcctatagaaagcacaaataaagtgtacatcattgaagactttgaaaagttaactgttcaaggggaaaacagtatcttgaaatttcttgaagaaccaccggacaatacgattgctattttattgtctacaaaacctgagcaaattttagacacaatccattcaaggtgtcagcatgtgtatttcaagcctattgataaagaaaagtttataaatagattagttgaacaaaacatgtctaagccagtagctgaaatgattagtacttatactacgcaaatagataatgcaatagctttaaatgaagaatttgatttattagcattaaggaaatcagttatacgttggtgtgaattgttgcttactaacaagccaatggcacttataggtattattgatttattgaaacaggctaaaaataaaaaactgcaatctttaactattgcagctgtgaatggtttcttcgaagatatcatacatacaaaggtaaatgtagaggataaacaaatatatagtgatttaaaaaatgatattgatcaatatgcgcaaaagttgtcgtttaatcaattaattttgatgtttgatcaactgacggaagcacataagaaattgaatcaaaatgtaaatccaacgcttgtatttgaacaaatcgtaattaagggtgtgagttagatgccaaatgtaataggtgttcagtttcaaaaagcgggaaaattagaatattatacacctaatgatatacaagtagatatagaagactgggtagttgtcgaatctaaaagaggcatagagataggtattgttaaaaatccattaatggatattgctgaagaggatgttgtgttacctcttaaaaatattattcgcattgctgatgacaaagatattgataaatttaattgtaatgaacgagatgctgaaaatgcattaatactatgtaaagacattgtaagagaacaaggtttggacatgcgtttagtcaattgcgaatatacattagataaatcgaaagttatttttaattttacggcggatgatcgtattgattttagaaaattagtaaaaatattagcgcaacatttaaaaacacgtatcgagttgagacaaattggtgtaagggatgaagccaaattgcttggcggtatcggaccttgtggtaggtcgttatgttgttctacatttttaggggattttgaaccagtatcgattaagatggctaaggatcaaaatttatcattaaatccaactaaaatttctggtgcatgtggtcgtttgatgtgttgtttaaaatatgaaaatgactattatgaggaagtacgtgcacaattacctgatattggtgaagcaattgaaacgcctgatggtaacgggaaagtagttgctttaaatatattagacatttctatgcaggtgaagcttgagggacatgaacagccacttgaatataaattagaagaaatagaaactatgcattaaggaggcattattacatttggatcgcaatgaaatatttgaaaaaataatgcgtttagaaatgaatgtcaatcaactttcaaaggaaacttcagaattaaaggcacatgcagttgaattagtagaagaaaatgtagcgcttcaacttgaaaatgataatttgaaaaaggtgttgggcaatgatgaaccaactactattgatactgcgaattcaaaaccagcaaaagctgtgaaaaagccattaccaagtaaagataatttggctatattgtatggagaaggatttcatatttgtaaaggcgaattatttggaaaacatcgacatggtgaagattgtctgttctgtttagaagttttaagtgattaatcaagcacactcaaatagtgttataattataaatgaatatggtttggataagtctgagacaatgcatgtttcaggctttaattgtgtataaagttttggtgattgcataagagatggcggtactaaatgttattattaagtgtgcacgcagtatcattagttataaaatgtagctgttaaaagtcaaaaatacatcgaatgtagttaggcatataatataaaaagagatttcaattactcaatagaaaaaggttgtcttcataggagttaaaaatgttaaaagagaatgaacgatttgatcaactaatcaaagaagattttagtattattcaaaatgatgatgttttttcgttttcaacggatgctttgttgttagggcattttacaaaacctagaacaaaagatattgtgttggacttatgttcaggcaatggggtgatacccttgttattgtttgcgaaacatccacgacatatagaaggtgttgagattcaaaaaacacttgtcgatatggcgcgacgcacatttcaattcaatgatgttgatgaatatttaacaatgcatcacatggatttgaaaaacgttactaaagtatttaaaccttcacaatatactttagtaacgtgtaatccgccttattttaaagagaatcagcaacaccaacatcaaaaagaagcacataagatagcgagacatgagattatgtgtacacttgaagattgcatgattgcagcccgtcatttattaaaagaaggtggcaggctaaatatggtacatcgtgcagatagactaatggatgtcttgtttgaaatgagaaaagtgaatattgaacctaagaaagtcgtttttatatatagtaaggtagggaaatcagcacaaacgatagtagtagaaggtcgaaaaggtggaaatcaaggtttagaaatcatgcccccattttatatttataatgaagatggtaattatagcgaagaaatgaaggacgtatattatggatagtcattttgtatatattgtaaaatgtagtgatggaagtttatatacaggatacgctaaagacgttaatgcacgtgttgaaaaacataaccgaggtcaaggagccaaatatacgaaagtaagacgtccggtgcatttagtttatcaagaaatgtatgagacaaagtctgaagcattgaagcgtgaatatgaaattaaaacttataccagacaaaagaaattgcgattaattaaggagcgatagtatggctgtattatatttagtgggcacaccaattggtaatttagcagatattacttatagagcagttgatgtattgaaacgtgttgatatgattgcttgtgaagacactagagtaactagtaagctgtgtaatcattatgatattccaactccattaaagtcatatcacgaacataacaaggataagcagactgcttttatcattgaacagttagaattaggtcttgacgttgcgctcgtatctgatgctggattgcccttaattagtgatcctggatacgaattagtagtggcagccagagaagctaatattaaagtagagactgtgcctggacctaatgctgggctgacggctttgatggctagtggattaccttcatatgtatatacatttttaggatttttgccacgaaaagagaaagaaaaaagtgctgtattagagcaacgtatgcatgaaaatagcacattaattatatacgaatcaccgcatcgtgtgacagatacattaaaaacaattgcaaagatagatgcaacacgacaagtatcactagggcgtgaattaactaagaagttcgaacaaattgtaactgatgatgtaacacaattacaagcattgattcagcaaggcgatgtaccattgaaaggcgaattcgttatcttaattgaaggtgctaaagcgaacaatgagatatcgtggtttgatgatttatctatcaatgagcatgttgatcattatattcaaacttcacagatgaaaccaaaacaagctattaaaaaagttgctgaagaacgacaacttaaaacgaatgaagtatataatatttatcatcaaataagttaa

SEQ ID NO: 5 - DNA, 4747 bp, Staphylococcus aureus
atggctaaagaaacattttatataacaaccccaatatactatcctagtgggaatttacatataggacatgcatattctacagtggctggagatgttattgcaagatataagagaatgcaaggatatgatgttcgttatttgactggaacggatgaacacggtcaaaaaattcaagaaaaagctcaaaaagctggtaagacagaaattgaatatttggatgagatgattgctggaattaaacaattgtgggctaagcttgaaatttcaaatgatgattttatcagaacaactgaagaacgtcataaacatgtcgttgagcaagtgtttgaacgtttattaaagcaaggtgatatctatttaggtgaatatgaaggttggtattctgttccggatgaaacatactatacagagtcacaattagtagacccacaatacgaaaacggtaaaattattggtggcaaaagtccagattctggacacgaagttgaactagttaaagaagaaagttatttctttaatattagtaaatatacagaccgtttattagagttctatgaccaaaatccagattttatacaaccaccatcaagaaaaaatgaaatgattaacaacttcattaaaccaggacttgctgatttagctgtttctcgtacatcatttaactggggtgtccatgttccgtctaatccaaaacatgttgtttatgtttggattgatgcgttagttaactatatttcagcattaggctatttatcagatgatgagtcactatttaacaaatactggccagcagatattcatttaatggctaaggaaattgtgcgattccactcaattatttggcctattttattgatggcattagacttaccgttacctaaaaaagtctttgcacatggttggattttgatgaaagatggaaaaatgagtaaatctaaaggtaatgttgtagaccctaatattttaattgatcgctatggtttagatgctacacgttattatctaatgcgtgaattaccatttggttcagatggcgtatttacacctgaagcatttgttgagcgtacaaatttcgatctagcaaatgacttaggtaacttagtaaaccgtacgatttctatggttaataagtactttgatggcgaattaccagcgtatcaaggtccacttcatgaattagatgaagaaatggaagctatggctttagaaacagtgaaaagctacactgaaagcatggaaagtttgcaattttctgtggcattatctacggtatggaagtttataagtagaacgaataagtatattgacgaaacaacgccttgggtattagctaaggacgatagccaaaaagatatgttaggcaatgtaatggctcacttagttgaaaatattcgttatgcagctgtattattacgtccattcttaacacatgcgccgaaagagatttttgaacaattgaacataaacaatcctcaatttatggaatttagtagtttagagcaatatggtgtgcttactgagtcaattatggttactgggcaacctaaacctattttcccaagattggatagcgaagcggaaattgcatatatcaaagaatcaatgcaaccgcctgctactgaagaggaaaaagaagagattcctagcaaacctcaaattgatattaaagactttgataaagttgaaattaaggcagcaacgattattgatgctgaacatgttaagaagtcagataagcttttaaaaattcaagtagacttagattctgaacaaagacaaattgtatcaggaattgccaaattctatacaccagatgatattattggtaaaaaagtagcagttgttactaacctgaaaccagctaaattaatgggacaaaaatctgaaggtatgatattatctgctgaaaaagatggtgtattaaccttagtaagtttaccaagtgcaattccaaatggtgcagtgattaaataactgtatttttaaaaattaggagagataattatgttaatcgatacacatgtccatttaaatgatgagcaatacgatgatgatttgagtgaagtgattacacgtgctagagaagcaggtgttgatcgtatgtttgtagttggttttaacaaatcgacaattgaacgcgcgatgaaattaatcgatgagtatgattttttatatggcattatcggttggcatccagttgacgcaattgattttacagaagaacacctggaatggattgaatctttagctcagcatccaaaagtgattggtattggtgaaatgggattagattatcactgggataaatctcctgcagatgttcaaaaggaagtttttagaaagcaaattgctttagctaagcgtttgaagttaccaattatcattcataaccgtgaagcaactcaagactgtatcgatatcttattggaggagcatgctgaagaggtaggcgggattatgcatagctttagtggttctccagaaattgcagatattgtaactaataagctgaatttttatatttcattaggtggacctgtgacatttaaaaatgctaaacagcctaaagaagttgctaagcatgtgtcaatggagcgtttgctagttgaaaccgatgcaccgtatctctcgccacatccgtatagagggaagcgaaatgaaccggcgagagtaactttagtagctgaacaaattgctgaattaaaaggcttatcttatgaagaagtgtgcgaacaaacaactaaaaatgcagagaaattgtttaatttaaattcataaagttaaaagtgagaaagatcaccgccataaatgtaaacgatgctatattcgtttaatatgctatggttctttctcacttttttaaattaaaatatcgtacatgtgcaatacgtacgatagagatggttagagctttgaaattaagaattgtaggaaggcgttttaaatgaaaatcaatgagtttatagttgtagaaggacgagatgatactgagcgtgttaaacgagctgttgaatgtgatacgattgaaacgaatggtagtgccatcaacgaacaaactttagaagtaattagaaatgctcaacaaagtcgaggcgttattgtattaacagatccagatttcccaggagataaaattagaagtacaattactgaacatgtcaaaggtgttaaacatgcgtatattgatagagaaaaagctaaaaataaaaaagggaaaattggtgttgaacatgccgacttaattgatattaaagaagcgttaatgcatgttagttcaccctttgatgaagcttatgaatcaattgataaatctgtgctaatagagttggggttaatcgttgggaaagatgcaaggcgccgtagagaaattttaagtagaaaattgcgaatcggccattccaatggtaagcagttattgaaaaagttaaatgcatttggttataccgaagcggatgtaaggcaagctttagaagatgaatgaggaagtgaaaatgttggataataaagatattgcaacaccatcaagaacgcgagcgttgttagataaatatggctttaattttaaaaaaagtttaggacagaactttttgatagatgtgaatatcattaataatatcattgatgcaagtgatattgatgcacaaactggggtgattgaaattggtccaggtatggggtcgttgacagaacaattggccagacatgctaaaagagtattggcatttgaaattgatcaacgtttaatacctgtattaaatgatactctatcaccttatgataatgtgacggtgattaatgaagatattttaaaagcgaatattaaagaagctgttgaaaatcatttacaagattgcgaaaaaataatggttgttgcaaacctgccgtactatattacgacgccaattttattaaatttaatgcaacaagatataccaattgatggctacgtggtgatgatgcaaaaagaagtgggcgaacgcttaaatgctgaagtaggttcaaaagcatatggttcattatcaattgtcgtacaatactatacagagactagtaaagtattaacggtacctaaatctgtatttatgccaccacctaatgttgattcaatagttgtaaaactgatgcagagaactgaaccgttagtaacagtagataacgaggaagcattctttaagttagcaaaagcagcatttgcacaaagaagaaagacaattaacaataactatcaaaattattttaaagatggtaaacaacacaaagaagtgattttacaatggttggaacaagcaggtattgatccaagacgtcgcggtgaaacgctatctattcaagattttgctaaattgtatgaagaaaagaaaaattccctcaattagaaaattaaatgattgacaaagcaaagcactattgttaaaatttaaattttgtttgacgaaaacgctgcaaatatggtattatgtaacttgtagcgaggtggagcaatatgccaaaatcaattttggacatcaaaaattctattgattgtcatgtaggaaatcgtattgtactgaaagccaatggaggccgtaagaaaacaataaaacgttctggaattttaaaagaaacatatccgtcagttttcattgttgagttagatcaagacaaacacaactttgagagagtatcttatacatacactgatgtgttaactgaaaatgttcaagtttcatttgaagaggataatcatcacgaatcaattgcacactaa

SEQ ID NO: 6 - DNA, 2778 bp, Staphylococcus aureus
atggctaaagaaacattttatataacaaccccaatatactatcctagtgggaatttacatataggacatgcatattctacagtggctggagatgttattgcaagatataagagaatgcaaggatatgatgttcgttatttgactggaacggatgaacacggtcaaaaaattcaagaaaaagctcaaaaagctggtaagacagaaattgaatatttggatgagatgattgctggaattaaacaattgtgggctaagcttgaaatttcaaatgatgattttatcagaacaactgaagaacgtcataaacatgtcgttgagcaagtgtttgaacgtttattaaagcaaggtgatatctatttaggtgaatatgaaggttggtattctgttccggatgaaacatactatacagagtcacaattagtagacccacaatacgaaaacggtaaaattattggtggcaaaagtccagattctggacacgaagttgaactagttaaagaagaaagttatttctttaatattagtaaatatacagaccgtttattagagttctatgaccaaaatccagattttatacaaccaccatcaagaaaaaatgaaatgattaacaacttcattaaaccaggacttgctgatttagctgtttctcgtacatcatttaactggggtgtccatgttccgtctaatccaaaacatgttgtttatgtttggattgatgcgttagttaactatatttcagcattaggctatttatcagatgatgagtcactatttaacaaatactggccagcagatattcatttaatggctaaggaaattgtgcgattccactcaattatttggcctattttattgatggcattagacttaccgttacctaaaaaagtctttgcacatggttggattttgatgaaagatggaaaaatgagtaaatctaaaggtaatgttgtagaccctaatattttaattgatcgctatggtttagatgctacacgttattatctaatgcgtgaattaccatttggttcagatggcgtatttacacctgaagcatttgttgagcgtacaaatttcgatctagcaaatgacttaggtaacttagtaaaccgtacgatttctatggttaataagtactttgatggcgaattaccagcgtatcaaggtccacttcatgaattagatgaagaaatggaagctatggctttagaaacagtgaaaagctacactgaaagcatggaaagtttgcaattttctgtggcattatctacggtatggaagtttataagtagaacgaataagtatattgacgaaacaacgccttgggtattagctaaggacgatagccaaaaagatatgttaggcaatgtaatggctcacttagttgaaaatattcgttatgcagctgtattattacgtccattcttaacacatgcgccgaaagagatttttgaacaattgaacataaacaatcctcaatttatggaatttagtagtttagagcaatatggtgtgcttactgagtcaattatggttactgggcaacctaaacctattttcccaagattggatagcgaagcggaaattgcatatatcaaagaatcaatgcaaccgcctgctactgaagaggaaaaagaagagattcctagcaaacctcaaattgatattaaagactttgataaagttgaaattaaggcagcaacgattattgatgctgaacatgttaagaagtcagataagcttttaaaaattcaagtagacttagattctgaacaaagacaaattgtatcaggaattgccaaattctatacaccagatgatattattggtaaaaaagtagcagttgttactaacctgaaaccagctaaattaatgggacaaaaatctgaaggtatgatattatctgctgaaaaagatggtgtattaaccttagtaagtttaccaagtgcaattccaaatggtgcagtgattaaataactgtatttttaaaaattaggagagataattatgttaatcgatacacatgtccatttaaatgatgagcaatacgatgatgatttgagtgaagtgattacacgtgctagagaagcaggtgttgatcgtatgtttgtagttggttttaacaaatcgacaattgaacgcgcgatgaaattaatcgatgagtatgattttttatatggcattatcggttggcatccagttgacgcaattgattttacagaagaacacctggaatggattgaatctttagctcagcatccaaaagtgattggtattggtgaaatgggattagattatcactgggataaatctcctgcagatgttcaaaaggaagtttttagaaagcaaattgctttagctaagcgtttgaagttaccaattatcattcataaccgtgaagcaactcaagactgtatcgatatcttattggaggagcatgctgaagaggtaggcgggattatgcatagctttagtggttctccagaaattgcagatattgtaactaataagctgaatttttatatttcattaggtggacctgtgacatttaaaaatgctaaacagcctaaagaagttgctaagcatgtgtcaatggagcgtttgctagttgaaaccgatgcaccgtatctctcgccacatccgtatagagggaagcgaaatgaaccggcgagagtaactttagtagctgaacaaattgctgaattaaaaggcttatcttatgaagaagtgtgcgaacaaacaactaaaaatgcagagaaattgtttaatttaaattcataa

SEQ ID NO: 7 - DNA, 4376 bp, Staphylococcus aureus
atggctaaagaaacattttatataacaaccccaatatactatcctagtgggaatttacatataggacatgcatattctacagtggctggagatgttattgcaagatataagagaatgcaaggatatgatgttcgttatttgactggaacggatgaacacggtcaaaaaattcaagaaaaagctcaaaaagctggtaagacagaaattgaatatttggatgagatgattgctggaattaaacaattgtgggctaagcttgaaatttcaaatgatgattttatcagaacaactgaagaacgtcataaacatgtcgttgagcaagtgtttgaacgtttattaaagcaaggtgatatctatttaggtgaatatgaaggttggtattctgttccggatgaaacatactatacagagtcacaattagtagacccacaatacgaaaacggtaaaattattggtggcaaaagtccagattctggacacgaagttgaactagttaaagaagaaagttatttctttaatattagtaaatatacagaccgtttattagagttctatgaccaaaatccagattttatacaaccaccatcaagaaaaaatgaaatgattaacaacttcattaaaccaggacttgctgatttagctgtttctcgtacatcatttaactggggtgtccatgttccgtctaatccaaaacatgttgtttatgtttggattgatgcgttagttaactatatttcagcattaggctatttatcagatgatgagtcactatttaacaaatactggccagcagatattcatttaatggctaaggaaattgtgcgattccactcaattatttggcctattttattgatggcattagacttaccgttacctaaaaaagtctttgcacatggttggattttgatgaaagatggaaaaatgagtaaatctaaaggtaatgttgtagaccctaatattttaattgatcgctatggtttagatgctacacgttattatctaatgcgtgaattaccatttggttcagatggcgtatttacacctgaagcatttgttgagcgtacaaatttcgatctagcaaatgacttaggtaacttagtaaaccgtacgatttctatggttaataagtactttgatggcgaattaccagcgtatcaaggtccacttcatgaattagatgaagaaatggaagctatggctttagaaacagtgaaaagctacactgaaagcatggaaagtttgcaattttctgtggcattatctacggtatggaagtttataagtagaacgaataagtatattgacgaaacaacgccttgggtattagctaaggacgatagccaaaaagatatgttaggcaatgtaatggctcacttagttgaaaatattcgttatgcagctgtattattacgtccattcttaacacatgcgccgaaagagatttttgaacaattgaacataaacaatcctcaatttatggaatttagtagtttagagcaatatggtgtgcttactgagtcaattatggttactgggcaacctaaacctattttcccaagattggatagcgaagcggaaattgcatatatcaaagaatcaatgcaaccgcctgctactgaagaggaaaaagaagagattcctagcaaacctcaaattgatattaaagactttgataaagttgaaattaaggcagcaacgattattgatgctgaacatgttaagaagtcagataagcttttaaaaattcaagtagacttagattctgaacaaagacaaattgtatcaggaattgccaaattctatacaccagatgatattattggtaaaaaagtagcagttgttactaacctgaaaccagctaaattaatgggacaaaaatctgaaggtatgatattatctgctgaaaaagatggtgtattaaccttagtaagtttaccaagtgcaattccaaatggtgcagtgattaaataactgtatttttaaaaattaggagagataattatgttaatcgatacacatgtccatttaaatgatgagcaatacgatgatgatttgagtgaagtgattacacgtgctagagaagcaggtgttgatcgtatgtttgtagttggttttaacaaatcgacaattgaacgcgcgatgaaattaatcgatgagtatgattttttatatggcattatcggttggcatccagttgacgcaattgattttacagaagaacacctggaatggattgaatctttagctcagcatccaaaagtgattggtattggtgaaatgggattagattatcactgggataaatctcctgcagatgttcaaaaggaagtttttagaaagcaaattgctttagctaagcgtttgaagttaccaattatcattcataaccgtgaagcaactcaagactgtatcgatatcttattggaggagcatgctgaagaggtaggcgggattatgcatagctttagtggttctccagaaattgcagatattgtaactaataagctgaatttttatatttcattaggtggacctgtgacatttaaaaatgctaaacagcctaaagaagttgctaagcatgtgtcaatggagcgtttgctagttgaaaccgatgcaccgtatctctcgccacatccgtatagagggaagcgaaatgaaccggcgagagtaactttagtagctgaacaaattgctgaattaaaaggcttatcttatgaagaagtgtgcgaacaaacaactaaaaatgcagagaaattgtttaatttaaattcataaagttaaaagtgagaaagatcaccgccataaatgtaaacgatgctatattcgtttaatatgctatggttctttctcacttttttaaattaaaatatcgtacatgtgcaatacgtacgatagagatggttagagctttgaaattaagaattgtaggaaggcgttttaaatgaaaatcaatgagtttatagttgtagaaggacgagatgatactgagcgtgttaaacgagctgttgaatgtgatacgattgaaacgaatggtagtgccatcaacgaacaaactttagaagtaattagaaatgctcaacaaagtcgaggcgttattgtattaacagatccagatttcccaggagataaaattagaagtacaattactgaacatgtcaaaggtgttaaacatgcgtatattgatagagaaaaagctaaaaataaaaaagggaaaattggtgttgaacatgccgacttaattgatattaaagaagcgttaatgcatgttagttcaccctttgatgaagcttatgaatcaattgataaatctgtgctaatagagttggggttaatcgttgggaaagatgcaaggcgccgtagagaaattttaagtagaaaattgcgaatcggccattccaatggtaagcagttattgaaaaagttaaatgcatttggttataccgaagcggatgtaaggcaagctttagaagatgaatgaggaagtgaaaatgttggataataaagatattgcaacaccatcaagaacgcgagcgttgttagataaatatggctttaattttaaaaaaagtttaggacagaactttttgatagatgtgaatatcattaataatatcattgatgcaagtgatattgatgcacaaactggggtgattgaaattggtccaggtatggggtcgttgacagaacaattggccagacatgctaaaagagtattggcatttgaaattgatcaacgtttaatacctgtattaaatgatactctatcaccttatgataatgtgacggtgattaatgaagatattttaaaagcgaatattaaagaagctgttgaaaatcatttacaagattgcgaaaaaataatggttgttgcaaacctgccgtactatattacgacgccaattttattaaatttaatgcaacaagatataccaattgatggctacgtggtgatgatgcaaaaagaagtgggcgaacgcttaaatgctgaagtaggttcaaaagcatatggttcattatcaattgtcgtacaatactatacagagactagtaaagtattaacggtacctaaatctgtatttatgccaccacctaatgttgattcaatagttgtaaaactgatgcagagaactgaaccgttagtaacagtagataacgaggaagcattctttaagttagcaaaagcagcatttgcacaaagaagaaagacaattaacaataactatcaaaattattttaaagatggtaaacaacacaaagaagtgattttacaatggttggaacaagcaggtattgatccaagacgtcgcggtgaaacgctatctattcaagattttgctaaattgtatgaagaaaagaaaaattccctcaattag

SEQ ID NO: 8 - DNA, 14553 bp, Staphylococcus aureus
atgaaatgtattgtaggtctaggtaatataggtaaacgttttgaacttacaagacataatatcggctttgaagtcgttgattatattttagagaaaaataatttttcattagataaacaaaagtttaaaggtgcatatacaattgaacgaatgaacggagataaagtgttatttatcgaaccaatgacaatgatgaatttgtcaggagaagcagttgcaccgattatggattattacaatgttaatccagaagatttaattgtcttatatgatgatttagatttagaacaaggacaagttcgcttaagacaaaaaggaagtgcgggcggtcacaatggtatgaaatcaattattaaaatgcttggtacagaccaatttaaacgtattcgtattggtgtgggaagaccaacgaatggtatgacggtacctgattatgttttacaacgcttttcaaatgatgaaatggtaacgatggaaaaagttatcgaacacgcagcacgcgcaattgaaaagtttgttgaaacatcacgatttgaccatgttatgaatgaatttaatggtgaagtgaaataatgacaatattgacaacgcttataaaagaagataatcattttcaagaccttaatcaggtatttggacaagcaaacacactagtaactggtctttccccgtcagctaaagtgacgatgattgctgaaaaatatgcacaaagtaatcaacagttattattaattaccaataatttataccaagcagataaattagaaacagatttacttcaatttatagatgctgaagaattgtataagtatcctgtgcaagatattatgaccgaagagttttcaacacaaagccctcaactgatgagtgaacgtattagaactttaactgcgttagctcaaggtaagaaagggttatttatcgttcctttaaatggtttgaaaaagtggttaactcctgttgaaatgtggcaaaatcaccaaatgacattgcgtgttggtgaggatatcgatgtggaccaatttcttaacaaattagttaatatggggtacaaacgggaatccgtggtatcgcatattggtgaattctcattgcgaggaggtattatcgatatctttccgctaattggggaaccaatcagaattgagctatttgataccgaaattgattctattcgcgattttgatgttgaaacgcagcgttccaaagataatattgaagaagtcgatatcacaactgcaagtgattatatcattactgaagaagtgattagacatcttaaagaagagttgaaaactgcatatgaaaatacaagacccaaaatagataaatcagtgcgcaatgatctgaaagaaacgtatgaaagctttaaattattcgaaagtacatactttgatcatcaaatactacgtcgtttagtagcgtttatgtatgaaacaccttcgacaattattgagtatttccaaaaagatgcaatcattgcagttgatgaatttaatcgtattaaagaaactgaagaaagtttaacagtagagtctgattcgtttattagcaatattattgaaagtggtaatggatttataggacaaagttttataaaatatgatgattttgaaacattgattgaaggctatcctgtcacttatttttcattattcgctacaacaatgccgataaaactaaatcatattattaaattttcatgtaaacctgtccaacaattttatgggcaatatgacattatgcgttctgaatttcaacgatatgtcaatcaaaattatcatatcgtggttttggtcgaaactgaaactaaagttgaacgtatgcaagcgatgttaagtgaaatgcatattccatcaataacaaaattgcatcgctcaatgtcatcggggcaagcagtgattattgaaggcagtttatctgaaggatttgaactacctgatatgggattagttgtcattactgagcgtgagctttttaaatcaaaacagaaaaagcaacgaaaacgtacgaaagctatctcaaatgctgaaaaaattaagtcttaccaagatttaaatgtgggagattatattgttcatgtgcatcatggtgttggtagatatttaggtgttgagacgctcgaagtggggcaaacgcatcgtgattatattaaattgcaatataaaggtacggatcaactatttgttccagtagatcaaatggatcaagttcaaaaatatgtagcttcggaagataagacgccaaaattaaataaactcggtggcagtgaatggaaaaaaacaaaagcaaaagttcaacaaagtgttgaagatattgctgaagagttgattgatttatataaagaaagagaaatggcagaaggttatcaatatggggaagacacagctgagcaaacaacatttgaattagattttccatatgaacttacgcctgaccaagctaaatctatcgatgaaattaaagatgacatgcaaaaatcgcgtccaatggatcgcttgctatgtggtgatgttggttatggtaaaactgaagttgcagtgagagcagcattcaaagctgtaatggaaggaaagcaagttgcatttttagttcctacaactattttagctcagcaacattatgagacgttaattgagcgtatgcaagattttcctgttgaaattcaattaatgagtcgttttagaacgccgaaagagataaaacaaactaaggaaggacttaaaactgggtttgttgacatagttgttggtacacacaaattacttagtaaagatatacagtataaagatttagggctgttgattgtagatgaagaacaacgatttggtgtacgccataaagagcgtattaaaacattaaaacataatgtagatgtactaacattgactgcaaccccaatacctagaacattgcatatgagtatgctaggtgtgcgcgatttgtcagtgattgaaacgccgccagaaaatcgtttcccagttcaaacatatgtattagaacagaacatgagttttatcaaagaagctttagaaagagaactatcccgtgatggccaagtgttttatctttataataaagtgcaatccatttatgaaaaacgagaacaactccagatgttaatgccagatgctaacattgcagttgctcatggacaaatgacagagcgcgatttagaagaaacgatgttaagttttatcaataatgaatatgatattttagtaacgacgacgattattgaaacaggtgtcgatgtcccaaatgcaaatactttgatcattgaagatgcagatcgctttggattgagtcagttgtatcaattaagaggtcgtgttggtcgttcaagtcgtattggttatgcatacttcttacatccagcaaataaggtactaactgagactgcagaagatcgattacaagcgattaaagaatttacggagttaggctcaggatttaagattgcgatgcgtgatttgaacattcgtggtgctggtaatttgttaggtaaacaacagcacggctttattgatacagttggatttgatttgtacagtcaaatgttagaagaagctgtaaatgaaaaacgtggtattaaggaaccagaatctgaggtgccagaagtcgaagttgatttaaacttggatgcatatttgccaacagaatatattgcaaatgaacaagctaaaattgaaatttataaaaagctacgaaaaactgaaacatttgatcaaattatcgacattaaagatgaattaattgatcgttttaatgattatcctgttgaagtagcacgtttgcttgatatagtggaaataaaagtacacgcattacattcaggtatcacgttgattaaagataaagggaaaataattgatattcatttatctgtaaaagccactgaaaatattgatggcgaagtgctgttcaaagcaacacaacctttaggtagaacaatgaaggttggtgttcaaaataatgcaatgacaattactttaacgaaacaaaatcaatggcttgatagtttgaagtttttagttaagtgcattgaagaaagcatgagaatcagtgatgaagcataaagaagcatttaatggcgttgtcgtgttaactgctgcattaattgtcattaaaattctgagtgctgtatatcgaattccatatcaaaatatattaggtgatacaggtttgtatgcatatcaacaagtgtatccaattgtagcattaggaatgatattatcgatgaatgccattcctagtgcaattacacaaaatatagggaagtatcatagtgacgaagcatatgcaaaagcggtcgcttatatacaattagttggtatattattatttattgctatttttgtgtttgcgaacaatattgcacatatgatgggtgatagccatttaacaccaatgattcaagcagcaagtttaagctttatatttataggtatgcttggcgtgttaagaggttattatcaatctgcaaataatatgacagttccggctatttcccaggttatagaacaagttatacgagtaggtattatcattgttactattgttatttttgtagacagaggttggacgatatatgaagcgggaacaattgctattttagcatcaacgataggttttttaggttcttcaatttatttagtagcgcaccgaccttttaagtttaaaatggtaaataacactgcaaagattgtttggaaacagttcgcactttcggttttgattttcgctatcagtcaattaatcgtaattttatggcaagtgattgatagtgttactattattaagtcacttcaagcgatacgcgtgccattcgatgttgccataactgaaaaaggagtctatgaccgtggtgcatcatttattcagatgggattgattgtaactacaacatttagttttgcgctcattcctctgttaagtgacgcaatcaaaatgaataatcaggtacttatgaatcgttatgcaaatgcgtcattaaagattacgattttaataagtacagcagcgggaataggattaattaatttattgcctttaatgaacggtgtgttttttaagacgaatgatttaaccttaacgttaagtgtttatatgattacggtcatttgtgtatcgttaattatgatggatatggctttattacaagcgcaacatgctgtgagacctatttttgttggtatgacggcaggattggttattaaatttatacttaatatcattttgattcgtttaagtggcattattggtgcgagcattagtactgttgtatcattaattatattcggtacgattatccatattgctgtcacgagaaaataccacttacatgcgatgagacgattttttatcaatgttgttttaggtatggtatttatgtcgattgttgttcaatgcgtgttaaacatagtgacaacacacggtagattcactggactcattgaattattatgtgcagcagtattaggtatcattgcattgtttttctatatttttagatttaatgttttgacatataaagagttaacttatttaccatttggttcaaagttgtatcaaattaagaaaggaagacgttgatggcacataccattacgattgttggcttaggaaactatggcattgatgatttgccgctagggatatataaatttttaaagacacaagataaagtttatgcaagaacgttagatcatccagttatagaatcattgcaagatgaattaacatttcagagttttgaccatgtttatgaagcacatgaccaatttgaagatgtctataacgatattgtggcgcaattggttgaagctgctaatgaaaaagatattgtctatgcggttccgggtcatcctagagttgctgagacaactacagtgaaattactggctttagcaaaggacaatactgatatagatgtgaaagttttaggtggtaaaagctttattgatgatgtgtttgaagcagttaatgtagatccaaatgatggcttcacactgttagatgcgacatcattacaagaagtaatacttaatgttagaacgcatacattgattacgcaagtttatagtgcaatggttgctgctaatttgaaaatcactttaatggaacgatatcctgatgattaccctgttcaaattgtcactggtgcacgaagcgatggtgcggataacgttgtgacatgcccattatatgaattggatcatgatgaaaatgcattcaataatttgacgagtgtattcgtaccaaaaatcataacatcgacatatttgtatcatgactttgattttgcaacggaagtgattgatactttagttgatgaagataaaggttgtccatgggataaagtgcaaacgcatgaaacgcttaagcgttatttacttgaagaaacatttgaattgttcgaagctattgacaatgaagatgattggcatatgattgaagaactaggagatattttattacaagtgttattgcatactagtattggtaaaaaagaagggtatatcgacattaaagaagtgattacaagtcttaatgctaaaatgattcgtagacacccacacatatttggtgatgccaatgctgaaactatcgatgacttaaaagaaatttggtctaaggcgaaagatgctgaaggtaaacagccaagagttaaatttgaaaaagtatttgcagagcattttttaaatttatatgagaagacgaaggataagtcatttgatgaggcctcgttaaagcagtggctagaaaaaggggagagtaatacatgagattagataaatatttaaaagtatcacggttaataaagcgacgtacgctagcaaaagaagtaagtgatcaaggtagaattacaataaatggtaatgttgctaaagctggatcggatgttaaagttgaagatgtgctgacgattcgctttggtcaaaaattagtaacagttaaagtaactgcattaaatgaacatgcatctaaagataacgcgaagggcatgtatgaaatcattgaagagcgtcgacttgaagaagcgtaaattggaggtgacaagcaatgaaaaataaagtagaacatatagaaaatcagtacacgtcgcaagagaacaagaaaaaacaacgtcaaaaaatgaaaatgcgtgttgttcgtaggcgtattacagtatttgcgggcgtattacttgcgataattgttgttttatcaatcttgcttgttgtccaaaaacatcgcaatgatattgatgcacaggagcgaaaagcgaaagaagcacagtttcaaaagcaacaaaatgaagaaattgcgttaaaagaaaagttgaataatctgaatgacaaagattacattgaaaaaattgcgcgtgatgattattacttaagcaacaaaggtgaagtgatttttaggttgccagaagacaaagattcgtctagctcaaaatcttcgaaaaaataaatccaaattgattcaaaattatccgagtatagacattgtgaaaaaatccaaacaaggatataataagggaaaatcgaatcaaatcgggaggatttatttaacatatgtcaatcgaagttggaaataagcttaaaggtaaagtcactggtattaaaaagtttggtgcattcgtagaattacctgaaggaaaaagtggtttagttcacattagtgaagtcgcagataattatgttgaaaacgtagaagagcacctttctgttggtgatgaagtagacgtgaaagtattatctattgctgatgatggaaaaattagtctttcaattaagaaagctaaagaccgtccacgtagacaacatacgagtaaaccaagtcatcaaaaaccagtgcaaaaagccgaagattttgaaaagaaattaagcaatttcttaaaagatagtgaagataaattaacttcaatcaaacgtcaaacagaatctagacgcggtggcaaaggttctagacgttaattaaaataaataaagactgtttcgataaggaatatatttagaatgatgcgtatcgaataatcgattgcagcgttagacaatctaagactgtttcttaaataaggagcagtctcttttatttgtaatgatataactaagacttataccatttttgaaaattgtaaaagtgaggtgatgttatgcagttaaatagtaatggttggcatgttgatgaccatattgttgtcgctgtttctacaggtattgatagtatgtgtttattgtatcaactactaaatgattataaagatagttatagaaaactaacatgcttacatgtcaatcatggcgttaggtcagcttcaattgaggaagccagatttttagaagcatactgcgaacgtcatcacattgatttacatatcaaaaagttagatttgtcgcatagtctcgaccgaaataacagcattcagaatgaagctcgaattaaacgttacgaatggtttgatgaaatgatgaatgtattagaagcggatgtattgctaacggcgcatcatttggacgatcaattagaaactattatgtatcgtatttttaatgggaaatcaacgcgtaataaactaggatttgatgagttatcgaagcgaaaaggttatcagatttatcgaccacttttagctgtctctaaaaaagaaataaaacaattccaagagagatatcatattccatattttgaagatgaatctaataaagataacaaatatattagaaatgatattcgtaatagaattattccagctattgatgaaaataatcaacttaaagtatcgcatttattaaaattaaaacaatggcatgatgaacaatatgatattttgcaatattcagctaaacaatttattcaagaatttgtgaagtttgatgaacagtcaaaatatttagaggtttctagacaagcttttaataacttaccaaactcattaaagatggttgtgttggactgcctattatcaaagtattatgagttgtttaatattagtgctaaaacatacgaagagtggtttaaacaatttagtagtaagaaagcacaattcagtattaatctcacggataaatggataattcaaatcgcatatggtaaattaataataatggctaaaaataatggcgatacatattttagagttcaaacaattaaaaagccaggtaattatttttttaacaaatatcgattagagatacattctaatttaccaaaatgtttatttccgcttacagtgagaacacgacaaagtggcgatacatttaaactgaatgggcgcgatggttataagaaagtgaatcgcctgtttatagattgtaaagtgccacagtgggttcgggatcaaatgccaatcgtattggataaacaacagcgcattattgcggtaggagatttatatcaacaacaaacaataaaaaaatggattataattagtaaaaatggagatgaatagcgttatgcataatgatttgaaagaagtattgttaactgaagaagatattcaaaatatctgtaaggaattgggagcacaattaacaaaggattatcaaggtaaaccattagtatgcgtgggtatcttaaaaggctcagcaatgtttatgtcagatttaattaaacgaattgatacccatttatcaattgatttcatggatgtttctagttatcacggaggcactgagtcaactggtgaagttcaaatcattaaagatttaggttcttctattgaaaataaagacgtattaattattgaagatatcttagagactggtactacacttaagtcaattactgaattattacaatctagaaaagttaattcattagaaatagttactttattagataaaccaaaccgtcgtaaagcggacattgaagctaagtatgtaggtaaaaaaataccagatgaatttgttgttggttacggtttagattatcgtgaattataccgaaacttaccatatatcggtacgttaaaacctgaagtgtattcaaattaattttttaatcaatttcagttattattactatgcgtttgagaaataatagtgtagactcaaaaatatgaaaaatgtatttcatatatatttaattttagacaagacatatgtcttgaaaagttgaaaaatatagagattgataaaactaatacgggtgtgaatgacattgatgttaagctcaattactagcttataaaacatgtcatatgttacaatttttgttagttttattatgggaagtaggaggaaatgacgcatgcagaaagcttttcgcaatgtgctagttatcgtaataataggcgttattatttttggtctattttcatatttaaacggtaatggaaatatgccgaaacagcttacatataatcaatttactgagaagttggaaaaaggtgaccttaaaactttagaaatccaaccacaacaaaatgtctatatggtaagtggtaaaacgaaaaatgatgaagactattcatcaactattttatataacaacgaaaaagaattacaaaaaattactgatgctgctaaaaagcaaaacggtgtaaaattaacgattaaagaagaagaaaaacaaagtgtctttgtgagtatactttcaacattaattccagttgtagtcatagcgttattatttattttcttcctaagccaagcacaaggtggcggtagtggcggtcgtatgatgaactttggtaaatctaaagcaaaaatgtacgataataataaacgtcgtgttcgtttctctgatgtagcaggggcagatgaagaaaaacaagaattaattgaaattgttgatttcttgaaagataataaaaaattcaaagaaatgggatctaggattcctaaaggtgtcttacttgttggacctccaggtactggtaaaacattacttgctagagcggttgcaggtgaagctggcgcaccattcttctctattagtggttcagactttgtagagatgtttgttggtgttggtgcgagccgtgttcgtgacttattcgataatgctaagaaaaacgcgccttgtatcatctttatcgatgagattgatgctgttggtcgtcaacgtggtgcaggtgttggtggcggtcatgatgaacgtgaacaaaccctaaaccaattattagttgaaatggatggtttcggtgaaaatgaaggtatcattatgatagctgctacaaaccgtcctgatatccttgacccagccttattacgtccaggtcgttttgatagacaaattcaagttggtcgtccagatgtgaaaggccgtgaagcaattcttcatgttcatgctaaaaacaaaccacttgatgaaacggttgatttaaaagcaatttcacaacgtacacctggtttctcaggtgctgatttagagaacttattaaatgaagcatctttaattgctgtacgtgaaggtaaaaagaaaattgacatgagagatatcgaagaggcaacggatagagttatagccggacctgctaagaaatctcgagttatttctaagaaagaacgtaatattgttgctcatcacgaagctggtcatacaattatcggtatggtacttgatgaggcagaagtagtgcataaagttactattgttccacgtggacaagcaggtggttatgcaatgatgctacctaaacaagatcgtttcttaatgactgaacaagagttattagataaaatctgtggtttacttggtggacgtgtatcagaagatattaactttaacgaagtatcaacaggtgcttcaaatgacttcgaacgtgcaacacaaatcgcacgctcaatggttacgcaatatggtatgagtaaaaaattaggaccattacagttcggtcatagcaatggtcaagtattcttaggtaaagatatgcaaggtgagcctaattattcaagccaaatcgcatatgaaattgataaagaagttcaacgaatcgttaaagaacaatacgaacgttgtaaacaaattttattagagcacaaagaacaattaattttaattgctgaaacattattaacagaagaaacattagttgctgaacaaattcaatcattattctacgaaggtaaattacctgaaattgattatgatgcagctaaagttgttaaagatgaagattctgaatttaatgatggtaaattcggtaaatcttatgaagagattcgtaaagagcaattagaagatggacaacgtgacgaaagtgaagatcgtaaagaagaaaaagatattgctgaggataaaaaagaagctgataaatctgatgaaaaagatgaaccagcacatcgacaagccccaaatatcgaaaaaccttacgatccaaatcacccagacaataaataatcgattatattcagtacctctttctatgataaagttatagaaagaggtacttttatcgtttttaaaaatacgtattagattttaagtcattgaattgttatagcagaaaataattgtaaaacaagttacttcattatttagaatgatgggtgtagaataagtacaattgttgcattttatgaagtaaagtaattttaaaatatagagtaatagaggagattgaaataatgacacacgattatattgttaaagcattagcatttgatggggagattagggcttatgctgctttgacaactgaaactgttcaagaagcacaaacgagacattatacatggccgacagcatctgctgcaatgggaagaacaatgacagcaacagctatgatgggcgcaatgttgaaaggtgatcaaaaattaactgtcactgtagatggccaaggacctattggacgaattattgccgatgcaaatgctaaaggcgaggtgcgtgcttatgtagaccatccacaaactcattttccattaaatgagcaaggtaaacttgatgtaagacgagcagtagggacaaatggatctattatagttgttaaagacgttggaatgaaagactatttctctggagcaagtccaattgtttcaggagaacttggtgaagattttacttattattatgctacaagtgaacaaacaccttcatcggtaggtcttggtgtattggtaaatcctgataatacgattaaagcagcaggaggatttatcattcaagttatgccaggtgccaaagatgaaacaatttcaaaattagaaaaagcaattagtgaaatgacaccagtttctaaattaattgaacaaggattaacgccagaaggattactaaacgaaatcttaggtgaagaccatgtgcaaattttagagaaaatgcctgttcaatttgaatgtaattgtagtcatgagaaatttttaaatgctattaaaggattgggcgaggctgagattcaaaatatgattaaagaagatcatggtgctgaagcagtatgtcatttctgtggaaataaatataaatatactgaagaagaattaaacgtgttgctagaaagtttagcgtaatttaatttaaatcaatacgctaaaatgtttatttttagcggtttagtgaaatgtagaactaaatagttgtataatccttagtgattttgtttgctttctagaatttatttgataaaataattctatatccgataaataaactaagatttcaacaactaactaaaaaggagtgttcttaatggcacaaaaaccagtagataatattactcaaattattggcggtacaccggtagtcaaattgagaaatgtagtagatgacaatgcagcagatgtttatgtaaaattggaatatcaaaatccaggtggttctgtaaaggatagaattgctttagcaatgattgaaaaagcagagcgagaaggcaaaattaaacctggcgacacaattgtagaaccaacaagtggtaatacaggtatcggtttagcatttgtatgtgctgctaaaggatataaagcagtatttactatgcccgaaacaatgagccaagagcgtcgtaatttattaaaagcatacggtgcggaattagttttaacgcctggatcagaagcgatgaaaggtgcaattaaaaaagctaaagaattaaaagaagaacatggttacttcgagccacaacaatttgaaaaccctgcgaaccctgaagttcatgagttaactacaggtcctgagttattacaacaatttgaagggaaaactatcgatgcgttcctagctggtgttggtactggtggtacgttatctggtgtaggtaaagttctgaaaaaagaatatcctaacatcgaaattgttgctatagagcctgaggcttctccagtattgagcggtggtgagccaggtccacataaattacaaggtttaggtgctggatttattccaggcactttgaatacagaaatctatgacagtattattaaagtaggaaatgatacagcgatggaaatgtctcgtcgagttgctaaagaggaaggtattttagcaggtatttcatcaggtgctgcgatttatgctgccattcaaaaagcaaaagaattaggaaaaggtaaaacagtagtaacagtattgccgagtaatggtgaacgctacttatcaacacctttatattcattcgatgactaa

SEQ ID NO: 9 - DNA, 7964 bp, Staphylococcus aureus
atgaaatgtattgtaggtctaggtaatataggtaaacgttttgaacttacaagacataatatcggctttgaagtcgttgattatattttagagaaaaataatttttcattagataaacaaaagtttaaaggtgcatatacaattgaacgaatgaacggagataaagtgttatttatcgaaccaatgacaatgatgaatttgtcaggagaagcagttgcaccgattatggattattacaatgttaatccagaagatttaattgtcttatatgatgatttagatttagaacaaggacaagttcgcttaagacaaaaaggaagtgcgggcggtcacaatggtatgaaatcaattattaaaatgcttggtacagaccaatttaaacgtattcgtattggtgtgggaagaccaacgaatggtatgacggtacctgattatgttttacaacgcttttcaaatgatgaaatggtaacgatggaaaaagttatcgaacacgcagcacgcgcaattgaaaagtttgttgaaacatcacgatttgaccatgttatgaatgaatttaatggtgaagtgaaataatgacaatattgacaacgcttataaaagaagataatcattttcaagaccttaatcaggtatttggacaagcaaacacactagtaactggtctttccccgtcagctaaagtgacgatgattgctgaaaaatatgcacaaagtaatcaacagttattattaattaccaataatttataccaagcagataaattagaaacagatttacttcaatttatagatgctgaagaattgtataagtatcctgtgcaagatattatgaccgaagagttttcaacacaaagccctcaactgatgagtgaacgtattagaactttaactgcgttagctcaaggtaagaaagggttatttatcgttcctttaaatggtttgaaaaagtggttaactcctgttgaaatgtggcaaaatcaccaaatgacattgcgtgttggtgaggatatcgatgtggaccaatttcttaacaaattagttaatatggggtacaaacgggaatccgtggtatcgcatattggtgaattctcattgcgaggaggtattatcgatatctttccgctaattggggaaccaatcagaattgagctatttgataccgaaattgattctattcgcgattttgatgttgaaacgcagcgttccaaagataatattgaagaagtcgatatcacaactgcaagtgattatatcattactgaagaagtgattagacatcttaaagaagagttgaaaactgcatatgaaaatacaagacccaaaatagataaatcagtgcgcaatgatctgaaagaaacgtatgaaagctttaaattattcgaaagtacatactttgatcatcaaatactacgtcgtttagtagcgtttatgtatgaaacaccttcgacaattattgagtatttccaaaaagatgcaatcattgcagttgatgaatttaatcgtattaaagaaactgaagaaagtttaacagtagagtctgattcgtttattagcaatattattgaaagtggtaatggatttataggacaaagttttataaaatatgatgattttgaaacattgattgaaggctatcctgtcacttatttttcattattcgctacaacaatgccgataaaactaaatcatattattaaattttcatgtaaacctgtccaacaattttatgggcaatatgacattatgcgttctgaatttcaacgatatgtcaatcaaaattatcatatcgtggttttggtcgaaactgaaactaaagttgaacgtatgcaagcgatgttaagtgaaatgcatattccatcaataacaaaattgcatcgctcaatgtcatcggggcaagcagtgattattgaaggcagtttatctgaaggatttgaactacctgatatgggattagttgtcattactgagcgtgagctttttaaatcaaaacagaaaaagcaacgaaaacgtacgaaagctatctcaaatgctgaaaaaattaagtcttaccaagatttaaatgtgggagattatattgttcatgtgcatcatggtgttggtagatatttaggtgttgagacgctcgaagtggggcaaacgcatcgtgattatattaaattgcaatataaaggtacggatcaactatttgttccagtagatcaaatggatcaagttcaaaaatatgtagcttcggaagataagacgccaaaattaaataaactcggtggcagtgaatggaaaaaaacaaaagcaaaagttcaacaaagtgttgaagatattgctgaagagttgattgatttatataaagaaagagaaatggcagaaggttatcaatatggggaagacacagctgagcaaacaacatttgaattagattttccatatgaacttacgcctgaccaagctaaatctatcgatgaaattaaagatgacatgcaaaaatcgcgtccaatggatcgcttgctatgtggtgatgttggttatggtaaaactgaagttgcagtgagagcagcattcaaagctgtaatggaaggaaagcaagttgcatttttagttcctacaactattttagctcagcaacattatgagacgttaattgagcgtatgcaagattttcctgttgaaattcaattaatgagtcgttttagaacgccgaaagagataaaacaaactaaggaaggacttaaaactgggtttgttgacatagttgttggtacacacaaattacttagtaaagatatacagtataaagatttagggctgttgattgtagatgaagaacaacgatttggtgtacgccataaagagcgtattaaaacattaaaacataatgtagatgtactaacattgactgcaaccccaatacctagaacattgcatatgagtatgctaggtgtgcgcgatttgtcagtgattgaaacgccgccagaaaatcgtttcccagttcaaacatatgtattagaacagaacatgagttttatcaaagaagctttagaaagagaactatcccgtgatggccaagtgttttatctttataataaagtgcaatccatttatgaaaaacgagaacaactccagatgttaatgccagatgctaacattgcagttgctcatggacaaatgacagagcgcgatttagaagaaacgatgttaagttttatcaataatgaatatgatattttagtaacgacgacgattattgaaacaggtgtcgatgtcccaaatgcaaatactttgatcattgaagatgcagatcgctttggattgagtcagttgtatcaattaagaggtcgtgttggtcgttcaagtcgtattggttatgcatacttcttacatccagcaaataaggtactaactgagactgcagaagatcgattacaagcgattaaagaatttacggagttaggctcaggatttaagattgcgatgcgtgatttgaacattcgtggtgctggtaatttgttaggtaaacaacagcacggctttattgatacagttggatttgatttgtacagtcaaatgttagaagaagctgtaaatgaaaaacgtggtattaaggaaccagaatctgaggtgccagaagtcgaagttgatttaaacttggatgcatatttgccaacagaatatattgcaaatgaacaagctaaaattgaaatttataaaaagctacgaaaaactgaaacatttgatcaaattatcgacattaaagatgaattaattgatcgttttaatgattatcctgttgaagtagcacgtttgcttgatatagtggaaataaaagtacacgcattacattcaggtatcacgttgattaaagataaagggaaaataattgatattcatttatctgtaaaagccactgaaaatattgatggcgaagtgctgttcaaagcaacacaacctttaggtagaacaatgaaggttggtgttcaaaataatgcaatgacaattactttaacgaaacaaaatcaatggcttgatagtttgaagtttttagttaagtgcattgaagaaagcatgagaatcagtgatgaagcataaagaagcatttaatggcgttgtcgtgttaactgctgcattaattgtcattaaaattctgagtgctgtatatcgaattccatatcaaaatatattaggtgatacaggtttgtatgcatatcaacaagtgtatccaattgtagcattaggaatgatattatcgatgaatgccattcctagtgcaattacacaaaatatagggaagtatcatagtgacgaagcatatgcaaaagcggtcgcttatatacaattagttggtatattattatttattgctatttttgtgtttgcgaacaatattgcacatatgatgggtgatagccatttaacaccaatgattcaagcagcaagtttaagctttatatttataggtatgcttggcgtgttaagaggttattatcaatctgcaaataatatgacagttccggctatttcccaggttatagaacaagttatacgagtaggtattatcattgttactattgttatttttgtagacagaggttggacgatatatgaagcgggaacaattgctattttagcatcaacgataggttttttaggttcttcaatttatttagtagcgcaccgaccttttaagtttaaaatggtaaataacactgcaaagattgtttggaaacagttcgcactttcggttttgattttcgctatcagtcaattaatcgtaattttatggcaagtgattgatagtgttactattattaagtcacttcaagcgatacgcgtgccattcgatgttgccataactgaaaaaggagtctatgaccgtggtgcatcatttattcagatgggattgattgtaactacaacatttagttttgcgctcattcctctgttaagtgacgcaatcaaaatgaataatcaggtacttatgaatcgttatgcaaatgcgtcattaaagattacgattttaataagtacagcagcgggaataggattaattaatttattgcctttaatgaacggtgtgttttttaagacgaatgatttaaccttaacgttaagtgtttatatgattacggtcatttgtgtatcgttaattatgatggatatggctttattacaagcgcaacatgctgtgagacctatttttgttggtatgacggcaggattggttattaaatttatacttaatatcattttgattcgtttaagtggcattattggtgcgagcattagtactgttgtatcattaattatattcggtacgattatccatattgctgtcacgagaaaataccacttacatgcgatgagacgattttttatcaatgttgttttaggtatggtatttatgtcgattgttgttcaatgcgtgttaaacatagtgacaacacacggtagattcactggactcattgaattattatgtgcagcagtattaggtatcattgcattgtttttctatatttttagatttaatgttttgacatataaagagttaacttatttaccatttggttcaaagttgtatcaaattaagaaaggaagacgttgatggcacataccattacgattgttggcttaggaaactatggcattgatgatttgccgctagggatatataaatttttaaagacacaagataaagtttatgcaagaacgttagatcatccagttatagaatcattgcaagatgaattaacatttcagagttttgaccatgtttatgaagcacatgaccaatttgaagatgtctataacgatattgtggcgcaattggttgaagctgctaatgaaaaagatattgtctatgcggttccgggtcatcctagagttgctgagacaactacagtgaaattactggctttagcaaaggacaatactgatatagatgtgaaagttttaggtggtaaaagctttattgatgatgtgtttgaagcagttaatgtagatccaaatgatggcttcacactgttagatgcgacatcattacaagaagtaatacttaatgttagaacgcatacattgattacgcaagtttatagtgcaatggttgctgctaatttgaaaatcactttaatggaacgatatcctgatgattaccctgttcaaattgtcactggtgcacgaagcgatggtgcggataacgttgtgacatgcccattatatgaattggatcatgatgaaaatgcattcaataatttgacgagtgtattcgtaccaaaaatcataacatcgacatatttgtatcatgactttgattttgcaacggaagtgattgatactttagttgatgaagataaaggttgtccatgggataaagtgcaaacgcatgaaacgcttaagcgttatttacttgaagaaacatttgaattgttcgaagctattgacaatgaagatgattggcatatgattgaagaactaggagatattttattacaagtgttattgcatactagtattggtaaaaaagaagggtatatcgacattaaagaagtgattacaagtcttaatgctaaaatgattcgtagacacccacacatatttggtgatgccaatgctgaaactatcgatgacttaaaagaaatttggtctaaggcgaaagatgctgaaggtaaacagccaagagttaaatttgaaaaagtatttgcagagcattttttaaatttatatgagaagacgaaggataagtcatttgatgaggcctcgttaaagcagtggctagaaaaaggggagagtaatacatgagattagataaatatttaaaagtatcacggttaataaagcgacgtacgctagcaaaagaagtaagtgatcaaggtagaattacaataaatggtaatgttgctaaagctggatcggatgttaaagttgaagatgtgctgacgattcgctttggtcaaaaattagtaacagttaaagtaactgcattaaatgaacatgcatctaaagataacgcgaagggcatgtatgaaatcattgaagagcgtcgacttgaagaagcgtaaattggaggtgacaagcaatgaaaaataaagtagaacatatagaaaatcagtacacgtcgcaagagaacaagaaaaaacaacgtcaaaaaatgaaaatgcgtgttgttcgtaggcgtattacagtatttgcgggcgtattacttgcgataattgttgttttatcaatcttgcttgttgtccaaaaacatcgcaatgatattgatgcacaggagcgaaaagcgaaagaagcacagtttcaaaagcaacaaaatgaagaaattgcgttaaaagaaaagttgaataatctgaatgacaaagattacattgaaaaaattgcgcgtgatgattattacttaagcaacaaaggtgaagtgatttttaggttgccagaagacaaagattcgtctagctcaaaatcttcgaaaaaataaatccaaattgattcaaaattatccgagtatagacattgtgaaaaaatccaaacaaggatataataagggaaaatcgaatcaaatcgggaggatttatttaacatatgtcaatcgaagttggaaataagcttaaaggtaaagtcactggtattaaaaagtttggtgcattcgtagaattacctgaaggaaaaagtggtttagttcacattagtgaagtcgcagataattatgttgaaaacgtagaagagcacctttctgttggtgatgaagtagacgtgaaagtattatctattgctgatgatggaaaaattagtctttcaattaagaaagctaaagaccgtccacgtagacaacatacgagtaaaccaagtcatcaaaaaccagtgcaaaaagccgaagattttgaaaagaaattaagcaatttcttaaaagatagtgaagataaattaacttcaatcaaacgtcaaacagaatctagacgcggtggcaaaggttctagacgttaa

SEQ ID NO: 10 - DNA, 5299 bp, Staphylococcus aureus
atgcagttaaatagtaatggttggcatgttgatgaccatattgttgtcgctgtttctacaggtattgatagtatgtgtttattgtatcaactactaaatgattataaagatagttatagaaaactaacatgcttacatgtcaatcatggcgttaggtcagcttcaattgaggaagccagatttttagaagcatactgcgaacgtcatcacattgatttacatatcaaaaagttagatttgtcgcatagtctcgaccgaaataacagcattcagaatgaagctcgaattaaacgttacgaatggtttgatgaaatgatgaatgtattagaagcggatgtattgctaacggcgcatcatttggacgatcaattagaaactattatgtatcgtatttttaatgggaaatcaacgcgtaataaactaggatttgatgagttatcgaagcgaaaaggttatcagatttatcgaccacttttagctgtctctaaaaaagaaataaaacaattccaagagagatatcatattccatattttgaagatgaatctaataaagataacaaatatattagaaatgatattcgtaatagaattattccagctattgatgaaaataatcaacttaaagtatcgcatttattaaaattaaaacaatggcatgatgaacaatatgatattttgcaatattcagctaaacaatttattcaagaatttgtgaagtttgatgaacagtcaaaatatttagaggtttctagacaagcttttaataacttaccaaactcattaaagatggttgtgttggactgcctattatcaaagtattatgagttgtttaatattagtgctaaaacatacgaagagtggtttaaacaatttagtagtaagaaagcacaattcagtattaatctcacggataaatggataattcaaatcgcatatggtaaattaataataatggctaaaaataatggcgatacatattttagagttcaaacaattaaaaagccaggtaattatttttttaacaaatatcgattagagatacattctaatttaccaaaatgtttatttccgcttacagtgagaacacgacaaagtggcgatacatttaaactgaatgggcgcgatggttataagaaagtgaatcgcctgtttatagattgtaaagtgccacagtgggttcgggatcaaatgccaatcgtattggataaacaacagcgcattattgcggtaggagatttatatcaacaacaaacaataaaaaaatggattataattagtaaaaatggagatgaatagcgttatgcataatgatttgaaagaagtattgttaactgaagaagatattcaaaatatctgtaaggaattgggagcacaattaacaaaggattatcaaggtaaaccattagtatgcgtgggtatcttaaaaggctcagcaatgtttatgtcagatttaattaaacgaattgatacccatttatcaattgatttcatggatgtttctagttatcacggaggcactgagtcaactggtgaagttcaaatcattaaagatttaggttcttctattgaaaataaagacgtattaattattgaagatatcttagagactggtactacacttaagtcaattactgaattattacaatctagaaaagttaattcattagaaatagttactttattagataaaccaaaccgtcgtaaagcggacattgaagctaagtatgtaggtaaaaaaataccagatgaatttgttgttggttacggtttagattatcgtgaattataccgaaacttaccatatatcggtacgttaaaacctgaagtgtattcaaattaattttttaatcaatttcagttattattactatgcgtttgagaaataatagtgtagactcaaaaatatgaaaaatgtatttcatatatatttaattttagacaagacatatgtcttgaaaagttgaaaaatatagagattgataaaactaatacgggtgtgaatgacattgatgttaagctcaattactagcttataaaacatgtcatatgttacaatttttgttagttttattatgggaagtaggaggaaatgacgcatgcagaaagcttttcgcaatgtgctagttatcgtaataataggcgttattatttttggtctattttcatatttaaacggtaatggaaatatgccgaaacagcttacatataatcaatttactgagaagttggaaaaaggtgaccttaaaactttagaaatccaaccacaacaaaatgtctatatggtaagtggtaaaacgaaaaatgatgaagactattcatcaactattttatataacaacgaaaaagaattacaaaaaattactgatgctgctaaaaagcaaaacggtgtaaaattaacgattaaagaagaagaaaaacaaagtgtctttgtgagtatactttcaacattaattccagttgtagtcatagcgttattatttattttcttcctaagccaagcacaaggtggcggtagtggcggtcgtatgatgaactttggtaaatctaaagcaaaaatgtacgataataataaacgtcgtgttcgtttctctgatgtagcaggggcagatgaagaaaaacaagaattaattgaaattgttgatttcttgaaagataataaaaaattcaaagaaatgggatctaggattcctaaaggtgtcttacttgttggacctccaggtactggtaaaacattacttgctagagcggttgcaggtgaagctggcgcaccattcttctctattagtggttcagactttgtagagatgtttgttggtgttggtgcgagccgtgttcgtgacttattcgataatgctaagaaaaacgcgccttgtatcatctttatcgatgagattgatgctgttggtcgtcaacgtggtgcaggtgttggtggcggtcatgatgaacgtgaacaaaccctaaaccaattattagttgaaatggatggtttcggtgaaaatgaaggtatcattatgatagctgctacaaaccgtcctgatatccttgacccagccttattacgtccaggtcgttttgatagacaaattcaagttggtcgtccagatgtgaaaggccgtgaagcaattcttcatgttcatgctaaaaacaaaccacttgatgaaacggttgatttaaaagcaatttcacaacgtacacctggtttctcaggtgctgatttagagaacttattaaatgaagcatctttaattgctgtacgtgaaggtaaaaagaaaattgacatgagagatatcgaagaggcaacggatagagttatagccggacctgctaagaaatctcgagttatttctaagaaagaacgtaatattgttgctcatcacgaagctggtcatacaattatcggtatggtacttgatgaggcagaagtagtgcataaagttactattgttccacgtggacaagcaggtggttatgcaatgatgctacctaaacaagatcgtttcttaatgactgaacaagagttattagataaaatctgtggtttacttggtggacgtgtatcagaagatattaactttaacgaagtatcaacaggtgcttcaaatgacttcgaacgtgcaacacaaatcgcacgctcaatggttacgcaatatggtatgagtaaaaaattaggaccattacagttcggtcatagcaatggtcaagtattcttaggtaaagatatgcaaggtgagcctaattattcaagccaaatcgcatatgaaattgataaagaagttcaacgaatcgttaaagaacaatacgaacgttgtaaacaaattttattagagcacaaagaacaattaattttaattgctgaaacattattaacagaagaaacattagttgctgaacaaattcaatcattattctacgaaggtaaattacctgaaattgattatgatgcagctaaagttgttaaagatgaagattctgaatttaatgatggtaaattcggtaaatcttatgaagagattcgtaaagagcaattagaagatggacaacgtgacgaaagtgaagatcgtaaagaagaaaaagatattgctgaggataaaaaagaagctgataaatctgatgaaaaagatgaaccagcacatcgacaagccccaaatatcgaaaaaccttacgatccaaatcacccagacaataaataatcgattatattcagtacctctttctatgataaagttatagaaagaggtacttttatcgtttttaaaaatacgtattagattttaagtcattgaattgttatagcagaaaataattgtaaaacaagttacttcattatttagaatgatgggtgtagaataagtacaattgttgcattttatgaagtaaagtaattttaaaatatagagtaatagaggagattgaaataatgacacacgattatattgttaaagcattagcatttgatggggagattagggcttatgctgctttgacaactgaaactgttcaagaagcacaaacgagacattatacatggccgacagcatctgctgcaatgggaagaacaatgacagcaacagctatgatgggcgcaatgttgaaaggtgatcaaaaattaactgtcactgtagatggccaaggacctattggacgaattattgccgatgcaaatgctaaaggcgaggtgcgtgcttatgtagaccatccacaaactcattttccattaaatgagcaaggtaaacttgatgtaagacgagcagtagggacaaatggatctattatagttgttaaagacgttggaatgaaagactatttctctggagcaagtccaattgtttcaggagaacttggtgaagattttacttattattatgctacaagtgaacaaacaccttcatcggtaggtcttggtgtattggtaaatcctgataatacgattaaagcagcaggaggatttatcattcaagttatgccaggtgccaaagatgaaacaatttcaaaattagaaaaagcaattagtgaaatgacaccagtttctaaattaattgaacaaggattaacgccagaaggattactaaacgaaatcttaggtgaagaccatgtgcaaattttagagaaaatgcctgttcaatttgaatgtaattgtagtcatgagaaatttttaaatgctattaaaggattgggcgaggctgagattcaaaatatgattaaagaagatcatggtgctgaagcagtatgtcatttctgtggaaataaatataaatatactgaagaagaattaaacgtgttgctagaaagtttagcgtaa

SEQ ID NO: 11 - DNA, 1840 bp, Staphylococcus aureus
atgcagttaaatagtaatggttggcatgttgatgaccatattgttgtcgctgtttctacaggtattgatagtatgtgtttattgtatcaactactaaatgattataaagatagttatagaaaactaacatgcttacatgtcaatcatggcgttaggtcagcttcaattgaggaagccagatttttagaagcatactgcgaacgtcatcacattgatttacatatcaaaaagttagatttgtcgcatagtctcgaccgaaataacagcattcagaatgaagctcgaattaaacgttacgaatggtttgatgaaatgatgaatgtattagaagcggatgtattgctaacggcgcatcatttggacgatcaattagaaactattatgtatcgtatttttaatgggaaatcaacgcgtaataaactaggatttgatgagttatcgaagcgaaaaggttatcagatttatcgaccacttttagctgtctctaaaaaagaaataaaacaattccaagagagatatcatattccatattttgaagatgaatctaataaagataacaaatatattagaaatgatattcgtaatagaattattccagctattgatgaaaataatcaacttaaagtatcgcatttattaaaattaaaacaatggcatgatgaacaatatgatattttgcaatattcagctaaacaatttattcaagaatttgtgaagtttgatgaacagtcaaaatatttagaggtttctagacaagcttttaataacttaccaaactcattaaagatggttgtgttggactgcctattatcaaagtattatgagttgtttaatattagtgctaaaacatacgaagagtggtttaaacaatttagtagtaagaaagcacaattcagtattaatctcacggataaatggataattcaaatcgcatatggtaaattaataataatggctaaaaataatggcgatacatattttagagttcaaacaattaaaaagccaggtaattatttttttaacaaatatcgattagagatacattctaatttaccaaaatgtttatttccgcttacagtgagaacacgacaaagtggcgatacatttaaactgaatgggcgcgatggttataagaaagtgaatcgcctgtttatagattgtaaagtgccacagtgggttcgggatcaaatgccaatcgtattggataaacaacagcgcattattgcggtaggagatttatatcaacaacaaacaataaaaaaatggattataattagtaaaaatggagatgaatagcgttatgcataatgatttgaaagaagtattgttaactgaagaagatattcaaaatatctgtaaggaattgggagcacaattaacaaaggattatcaaggtaaaccattagtatgcgtgggtatcttaaaaggctcagcaatgtttatgtcagatttaattaaacgaattgatacccatttatcaattgatttcatggatgtttctagttatcacggaggcactgagtcaactggtgaagttcaaatcattaaagatttaggttcttctattgaaaataaagacgtattaattattgaagatatcttagagactggtactacacttaagtcaattactgaattattacaatctagaaaagttaattcattagaaatagttactttattagataaaccaaaccgtcgtaaagcggacattgaagctaagtatgtaggtaaaaaaataccagatgaatttgttgttggttacggtttagattatcgtgaattataccgaaacttaccatatatcggtacgttaaaacctgaagtgtattcaaattaa

SEQ ID NO: 12 - DNA, 1620 bp, Staphylococcus aureus
atgactaaaacaaaaattatgggcatattaaacgtcacacctgattcattctcagatggtggaaaatttaataatgttgaaacagctataaatagagtgaaagccatgatagatgaaggtgctgacattatagatgttggaggtgtttcaacgagacccggtcatgaaatggttacattagaagaagagctgaacagagtattacctgttgttgaagctattgtcggttttgatgtaaaaatttcagtcgatacatttcgaagtgaggttgctgaagcatgtttaaaattaggcgttgatatgattaatgatcaatgggcgggtctgtatgatcatcgtatgttccaaattgtagctaaatatgacgcggaaattattttaatgcataatggaaatggtaatcgtgatgaaccggttgtcgaagaaatgttaacatctttgttagcacaagcacatcaagctaaaatagctggtataccttcaaataaaatttggctagatccaggtataggtttcgctaaaactagaaatgaagaagccgaagttatggcaagactggatgaacttgttgcaacagaatatccagttttattagcgacaagccggaaacgtttcactaaagagatgatgggttatgatacaacaccggttgaaagagatgaagtaactgcagctacgactgcatatggtattatgaaaggcgttagagcagtacgcgttcataatgtcgagttgaatgctaaattagctaaaggtatagattttttaaaggagaatgaaaatgcaagacacaatctttcttaaaggtatgcgcttttatggatatcatggtgctttatcagctgaaaatgaaatagggcaaattttcaaagtggatgtaactttgaaagtagacttagctgaagctgggcgtactgataatgttattgatacagttcattatggtgaagtgttcgaagaggttaaatcaattatggaaggtaaggccgttaatttacttgagcatctagctgaacgtattgcaaatcgtataaattcacaatataatcgtgtaatggaaacaaaagtgagaatcactaaagaaaacccaccgattccgggtcattatgatggagtaggtatcgaaatagtgagggagaataaatgattcaagcatacttaggattaggtagtaatattggtgatagagaaagccagttaaacgatgctataaagattttgaatgaatatgatggtattagcgtatctaatatttctccgatttatgaaacagcaccagttgggtatactgagcaacctaactttttaaatttgtgtgttgaaattcaaacaacactcacagtattacaactgttggaatgttgtttgaagacagaagaatgtttacaccgtattagaaaggaacgatggggtcctagaactttagatgtggatattttgttgtatggagaagaaatgatagatttaccaaaactgtcggtgccacatccgagaatgaatgaacgtgcatttgttttaatcccattaaatgatatagcagcaaatgtcgtagaaccacgttcgaaattgaaagtgaaagatttagtttttgtcgatgacagtgtaaagagatataaataa

SEQ ID NO: 13 - DNA, 5973 bp, Staphylococcus aureus
tctggtggctatagcaaggaggtcacacctgttcccatgccgaacacagaagttaagctccttagcgtcgatggtagtcgaacttacgttccgctagagtagaacgttgccaggcaaatgacaaatcggagaattagctcagctgggagagcatctgccttacaagcagagggtcggcggttcgaacccgtcattctccaccatttattcttagatatagccggcctagctcaattggtagagcaactgacttgtaatcagtaggttgggggttcaagtcctctggccggcaccatcttttgagccattagctcagctggtagagcatctgacttttaatcagagggtcagaggttcgaatcctctatggctcattacgatttaatttttatatttagcaaaataatgcagaagtagttcagcggtagaatacaaccttgccaaggttggggtcgcgggttcgaatcccgtcttctgctccattattttgccggggtggcggaactggcagacgcacaggacttaaaatcctgcggtgagagatcaccgtaccggttcgattccggtcctcggcaccattttagcgcccgtagctcaattggatagagcgtttgactacggatcaagaggttatgggttcgactcctatcgggcgcgccatttttaaattaattgaataacgggaagtagctcagcttggtagagcacttggtttgggaccaaggggtcgcaggttcgaatcctgtcttcccgattacttcttaaatttcattttatgggggcttagctcagctgggagagcgcctgctttgcacgcaggaggtcagcggttcgatcccgctagtctccaccatttatttttacacgatgaacattgaaaactgaatgacaatatgtcaacgttaattccaaaaaacgtaactataagttacaaacattatttagtatttatgagctaatcaaacatcataatttttatggagagtttgatcctggctcaggatgaacgctggcggcgtgcctaatacatgcaagtcgagcgaacggatgagaagcttgcttctctgatgttagcggcggacgggtgagtaacacgtggataacctacctataagactgggataacttcgggaaaccggagctaataccggataatattttgaaccgcatggttcaaaagtgaaagacggtcttgctgtcacttatagatggatccgcgctgcattagctagttggtaaggtaacggcttaccaaggcaacgatgcatagccgacctgagagggtgatcggccacactggaactgagacacggtccagactcctacgggaggcagcagtagggaatcttccgcaatgggcgaaagcctgacggagcaacgccgcgtgagtgatgaaggtcttcggatcgtaaaactctgttattagggaagaacatatgtgtaagtaactgtgcacatcttgacggtacctaatcagaaagccacggctaactacgtgccagcagccgcggtaatacgtaggtggcaagcgttatccggaattattgggcgtaaagcgcgcgtaggcggttttttaagtctgatgtgaaagcccacggctcaaccgtggagggtcattggaaactggaaaacttgagtgcagaagaggaaagtggaattccatgtgtagcggtgaaatgcgcagagatatggaggaacaccagtggcgaaggcgactttctggtctgtaactgacgctgatgtgcgaaagcgtggggatcaaacaggattagataccctggtagtccacgccgtaaacgatgagtgctaagtgttagggggtttccgccccttagtgctgcagctaacgcattaagcactccgcctggggagtacgaccgcaaggttgaaactcaaaggaattgacggggacccgcacaagcggtggagcatgtggtttaattcgaagcaacgcgaagaaccttaccaaatcttgacatcctttgacaactctagagatagagccttccccttcgggggacaaagtgacaggtggtgcatggttgtcgtcagctcgtgtcgtgagatgttgggttaagtcccgcaacgagcgcaacccttaagcttagttgccatcattaagttgggcactctaagttgactgccggtgacaaaccggaggaaggtggggatgacgtcaaatcatcatgccccttatgatttgggctacacacgtgctacaatggacaatacaaagggcagcgaaaccgcgaggtcaagcaaatcccataaagttgttctcagttcggattgtagtctgcaactcgactacatgaagctggaatcgctagtaatcgtagatcagcatgctacggtgaatacgttcccgggtcttgtacacaccgcccgtcacaccacgagagtttgtaacacccgaagccggtggagtaaccttttaggagctagccgtcgaaggtgggacaaatgattggggtgaagtcgtaacaaggtagccgtatcggaaggtgcggctggatcacctcctttctaaggatatattcggaacatcttcttcagaagatgcggaataacgtgacatattgtattcagttttgaatgtttatttaacattcaaaaaaatgggcctatagctcagctggttagagcgcacgcctgataagcgtgaggtcggtggttcgagtccacttaggcccaccattatttgtacattgaaaactagataagtaagtaaaatatagattttaccaagcaaaaccgagtgaataaagagttttaaataagcttgaattcataagaaataatcgctagtgttcgaagaacactcacaagattaataacgcgtttcctgtaggatggaaacatagattaagttattaagggcgcacggtggatgccttggcactagaagccgatgaaggacgttactaacgacgatatgctttggggagctgtaagtaagctttgatccagagatttccgaatggggaaacccagcatgagttatgtcatgttatcgatatgtgaatacatagcatatcagaaggcacacccggagaactgaaacatcttagtacccggaggaagagaaagaaaattcgattcccttagtagcggcgagcgaaacgggaagagcccaaaccaaaaagcttgcttgttggggttgtaggacgctctatacggagttacaaaggacgacattagacgaatcatctggaaagatgaatcaaagaaggtaataatcctgtagtcgaaaatgttgtctctcttgagtggatcctgagtacgacggagcacgtgaaattccgtcggaatctgggaggaccatctcctaaggctaaatactctctagtgaccgatagtgaaccagtaccgtgagggaaaggtgaaaagcaccccggaaggggagtgaaatagaacctgaaaccgtgtgcttacaagtagtcagagcccgttaatgggtgatggcgtgccttttgtagaatgaaccggcgagttacgatttgatgcaaggttaagcagtaaatgtggagccgtagcgaaagcgagtctgaatagggcgtttagtatttggtcgtagacccgaaaccaggtgatctacccttggtcaggttgaagttcaggtaacactgaatggaggaccgaaccgacttacgttgaaaagtgagcggatgaactgagggtagcggagaaattccaatcgaacctggagatagctggttctctccgaaatagctttagggctagcctcaagtgatgattattggaggtagagcactgtttggacgaggggcccctctcgggttaccgaattcagacaaactccgaatgccaattaatttaacttgggagtcagaacatgggtgataaggtccgtgttcgaaagggaaacagcccagaccaccagctaaggtcccaaaatatatgttaagtggaaaaggatgtggcgttgcccagacaactaggatgttggcttagaagcagccatcatttaaagagtgcgtaatagctcactagtcgagtgacactgcgccgaaaatgtaccggggctaaacatattaccgaagctgtggattgtcctttggacaatggtaggagagcgttctaagggcgttgaagcatgatcgtaaggacatgtggagcgcttagaagtgagaatgccggtgtgagtagcgaaagacgggtgagaatcccgtccaccgattgactaaggtttccagaggaaggctcgtccgctctgggttagtcgggtcctaagctgaggccgacaggcgtaggcgatggataacaggttgatattcctgtaccacctataatcgttttaatcgatggggggacgcagtaggataggcgaagcgtgcgattggattgcacgtctaagcagtaaggctgagtattaggcaaatccggtactcgttaaggctgagctgtgatggggagaagacattgagtcttcgagtcgttgatttcacactgccgagaaaagcctctagatagaaaataggtgcccgtaccgcaaaccgacacaggtagtcaagatgagaattctaaggtgagcgagcgaactctcgttaaggaactcggcaaaatgaccccgtaacttcgggagaaggggtgctctttagggttaacgcccagaagagccgcagtgaataggcccaagcgactgtttatcaaaaacacaggtctctgctaaaccgtaaggtgatgtataggggctgacgcctgcccggtgctggaaggttaagaggagtggttagcttctgcgaagctacgaatcgaagccccagtaaacggcggccgtaactataacggtcctaaggtagcgaaattccttgtcgggtaagttccgacccgcacgaaaggcgtaacgatttgggcactgtctcaacgagagactcggtgaaatcatagtacctgtgaagatgcaggttacccgcgacaggacggaaagaccccgtggagctttactgtagcctgatattgaaattcggcacagcttgtacaggataggtaggagcctttgaaacgtgagcgctagcttacgtggaggcgctggtgggatactaccctagctgtgttggctttctaacccgcaccacttatcgtggtgggagacagtgtcaggcgggcagtttgactggggcggtcgcctcctaaaaggtaacggaggcgctcaaaggttccctcagaatggttggaaatcattcatagagtgtaaaggcataagggagcttgactgcgagacctacaagtcgagcagggtcgaaagacggacttagtgatccggtggttccgcatggaagggccatcgctcaacggataaaagctaccccggggataacaggcttatctcccccaagagttcacatcgacggggaggtttggcacctcgatgtcggctcatcgcatcctggggctgtagtcggtcccaagggttgggctgttcgcccattaaagcggtacgcgagctgggttcagaacgtcgtgagacagttcggtccctatccgtcgtgggcgtaggaaatttgagaggagctgtccttagtacgagaggaccgggatggacatacctctggtgtaccagttgtcgtgccaacggcatagctgggtagctatgtgtggacgggataagtgctgaaagcatctaagcatgaagcccccctcaagatgagatttcccaacttcggttataagatccctcaaagatgatgaggttaataggttcgaggtggaagcatggtgacatgtggagctgacgaatactaatcgatcgaagacttaatcaaaataaatgttttgcgaagcaaaatcacttttacttactatctagttttgaatgtataaattacattcatatgtctggtgactatagcaaggaggtcacacctgttcccatgccgaacacagaagttaagctccttagcgtcgatggtagtcgaacttacgttccgctagagtagaacgttgccaggc

SEQ ID NO: 14 - DNA, 4350 bp, Staphylococcus aureus
ttgttaaaaagaatgagagacgatataaaaatggtatttgagcaggatccagcggcacgttcaacattagaagtcattacaacgtatgcaggtttacatgcagtttggagtcatttgattgcacataagttatacaaccaaaaaaaatatgttgcagcacgcgcgatatctcaaatttcaagatttttcacaggtatagaaatccatccaggtgctaaaattggaaagcgtctatttatagatcatggtatgggcgttgtaataggagaaacatgtacaattggtgataatgtgacaatctatcaaggcgtgacacttggtgggacagggaaagaaagagggaaaagacacccagatataggagacaatgttttaatagcagccggtgcgaaagttttaggaaatattaaaataaattcaaatgtaaatattggtgcaaattcagttgttttacaatcagttccaagttattcaacggttgttggtataccaggacatattgttaagcaagatggtgttcgagttggaaaaacatttgatcatcgccatctacctgatccaatttatgaacaaattaagcatttagaacgacaacttgaaaagactaggaatggagagattcaagatgattacattatataatacgcttacacgtcaaaaagaagtgttcaagcctatagaaccagggaaagtaaaaatgtatgtatgtggtcctactgtatataactacattcatattggtaacgcaagaccagcaattaattatgacgtagtgagacgttactttgaataccaaggatataatgtagaatatgtatcaaattttacagacgtagatgataaattaattaaacgttctcaagaattaaatcagtctgttcccgaaattgcagaaaaatatatcgctgcttttcatgaagatgttggtgcgttaaatgttagaaaagcgacttcaaatccaagggtaatggaccatatggatgacattattcaatttattaaagatttggtggatcaaggttatgcatatgaaagtggtggcgatgtttactttagaacacgtaaatttgaaggttatggtaaattaagtcatcaatccatagatgacttaaaagtgggtgctcgtatagatgcaggagagcataaagaagatgcacttgattttacattgtggaaaaaagcgaagcctggcgagattagttggaatagcccatttggtgaaggtagaccaggatggcatatagaatgttctgtaatggcatttcatgagctaggacctacaattgatatacatgcgggtggttcagatttacaatttccacatcatgaaaatgaaatagcacaatcagaagcacataatcatgcgccatttgctaattattggatgcataatggtttcattaatattgataatgaaaaaatgagtaaatcactaggcaactttattttagttcacgatattattaaagaagttgatccagatgtactaagattctttatgattagcgtacattatagaagcccaattaactataatctagaattggtagaatcagcacgtagtggactagagcgtattcgcaatagttatcaattaattgaagagcgcgcacaaattgctactaatattgaaaatcaacagacatatattgatcaaattgatgcgattttaaatcgttttgaaacagttatgaatgatgattttaatacagctaatgcaattacagcttggtatgatttagcaaaacttgcgaataaatatgtactagagaacacaacatcaacagaagtaattgataaatttaaagcagtttatcaaattttcagcgatgttttaggtgtaccgttaaaatctaaaaatgcagatgaattattggatgaagatgttgaaaaattaatcgaagagcgtaatgaagcaaggaaaaacaaagattttgcacgagcagatgagattcgagacatgctgaaatcacaaaacattatattagaagacacacctcaaggggttagatttaaacgtggatatcaacaagataatcacattaaattattgaatccattgaccttagcatatatgggagacgcagtcttagatcaatatgtacgtacctatatcgttttaaagcttaaaagtaagcctaataaactacatcaaatgtctaaaaaatatgtatctgccaaaagtcaggcgcaaacgttagaatatttaatggagcaagaatggtttacagacgaagaaatggatattttgaagcgagggcgtaacgcgaaaagtcatactaaagctaaaaacactgatgttcaaacatatcgtaaaagttcagcgatagaagcagtgataggttttctttatttagaaaaaagagaagaacgattagaggcattattaaataaaataataacaatagtaaacgaaaggtagtgacgatgtggaagatacggttattgttggtaggcatgctgttagagaagcgattattactgggcatccgataaataagatattgattcaagaaggtattaaaaagcaacaaattaatgaaattttaaaaaatgcaaaagatcaaaaaattattgttcaaactgtaccaaaatctaaattagattttttagcaaatgcaccacatcagggtgttgcagcgcttattgcaccatatgaatatgctgacttcgatcaatttttaaaacagcaaaaagaaaaagaaggtttatcgacagtacttatattagacggcttagaagacccgcataacttgggatcaattttaagaacagccgatgcaacgggagttgatggtgttattattcctaaacgtcgttcagttacactaacgcaaacagttgcaaaagcctcaacaggtgcaattgaacatgtaccagttattcgagtgacaaatttagctaaaactatcgatgaactaaaagataatggcttttgggtagctggcactgaagctaataatgcaacagattatagaaatctagaagcggacatgtcattggctattgtaattggtagcgaaggacagggtatgagtcgcctagtaagtgataaatgcgatttttatattaagattccaatggttggacatgtaaacagtttgaatgcttcggttgcagcaagtttaatgatgtacgaagtatttcgaaaaagacatgatgttggagaaatataatgaaagaacgttacttaatcattgatggatacaatatgataggacaatcaccaacgctaagcgccattgcaaaagagaatttagaagaagctagaatgcaattaatagatgcaattgcaaattataatgcagttatttcagatgaaattatttgtgttttcgatgcttatgaccaatcgggtgttgaaagagaatacatgtatcatggcgttaaaacgatttttaccaaggaaaaagaaacagctgatagtttcatagaacgttatgtttatgaactttatgacaagcatactaagcatattgcagttgtaacaagtgatatgagtgagcaacatgctatctttggatcaggtgcatatagaatatcatctcgcgaaatgtggagagatttaaaagaaaatgaaattgatgtgagtaaatcattagatgatataagtgaaaacaagccaagaactcgaattccgttatcttctgaaatccttgcagaatttgaaaaaatacgaagaggacatcataagaaatgacatttccgtcatcttgaaattttgaatgtaacaatattaaactaaccttaaattttagatagaaggggttagtttaatacttgaaatatgatttgacaactcaagacagtacaatcaaacgtaacaattcaataaatgataaagacttcgaaaagttagtaatggatctacaaccattaattattcgacgcatcaaaacatttggatttaatcattatgatttagaagacttatatcaagaaatacttatacggatgtataggtcggtccaaacatttgattttagtggagagcagcctttcacaaattatgttcaatgtttaattacgtctgtaaagtatgattatttgagaaaatatttagctacaaataaaagaatggataatttgattaatgaatatagagttacgtatccatgtgcaataaagcgttttgatgttgaaaacaattatttgaataaattagcaattaaagagttgatttgtcagtttaagtatttgagtgcatttgaaaaagatgtcatgtatttaatgtgtgaacaatataagccgagagaaattgctcaattgatgcatgtaaaagagaaagtgatttataatgccatacaacgatgtaaaaataaaataaaacgttatttcaaaatgatttga

SEQ ID NO: 15 - DNA, 3700 bp, Staphylococcus aureus
ttgttaaaaagaatgagagacgatataaaaatggtatttgagcaggatccagcggcacgttcaacattagaagtcattacaacgtatgcaggtttacatgcagtttggagtcatttgattgcacataagttatacaaccaaaaaaaatatgttgcagcacgcgcgatatctcaaatttcaagatttttcacaggtatagaaatccatccaggtgctaaaattggaaagcgtctatttatagatcatggtatgggcgttgtaataggagaaacatgtacaattggtgataatgtgacaatctatcaaggcgtgacacttggtgggacagggaaagaaagagggaaaagacacccagatataggagacaatgttttaatagcagccggtgcgaaagttttaggaaatattaaaataaattcaaatgtaaatattggtgcaaattcagttgttttacaatcagttccaagttattcaacggttgttggtataccaggacatattgttaagcaagatggtgttcgagttggaaaaacatttgatcatcgccatctacctgatccaatttatgaacaaattaagcatttagaacgacaacttgaaaagactaggaatggagagattcaagatgattacattatataatacgcttacacgtcaaaaagaagtgttcaagcctatagaaccagggaaagtaaaaatgtatgtatgtggtcctactgtatataactacattcatattggtaacgcaagaccagcaattaattatgacgtagtgagacgttactttgaataccaaggatataatgtagaatatgtatcaaattttacagacgtagatgataaattaattaaacgttctcaagaattaaatcagtctgttcccgaaattgcagaaaaatatatcgctgcttttcatgaagatgttggtgcgttaaatgttagaaaagcgacttcaaatccaagggtaatggaccatatggatgacattattcaatttattaaagatttggtggatcaaggttatgcatatgaaagtggtggcgatgtttactttagaacacgtaaatttgaaggttatggtaaattaagtcatcaatccatagatgacttaaaagtgggtgctcgtatagatgcaggagagcataaagaagatgcacttgattttacattgtggaaaaaagcgaagcctggcgagattagttggaatagcccatttggtgaaggtagaccaggatggcatatagaatgttctgtaatggcatttcatgagctaggacctacaattgatatacatgcgggtggttcagatttacaatttccacatcatgaaaatgaaatagcacaatcagaagcacataatcatgcgccatttgctaattattggatgcataatggtttcattaatattgataatgaaaaaatgagtaaatcactaggcaactttattttagttcacgatattattaaagaagttgatccagatgtactaagattctttatgattagcgtacattatagaagcccaattaactataatctagaattggtagaatcagcacgtagtggactagagcgtattcgcaatagttatcaattaattgaagagcgcgcacaaattgctactaatattgaaaatcaacagacatatattgatcaaattgatgcgattttaaatcgttttgaaacagttatgaatgatgattttaatacagctaatgcaattacagcttggtatgatttagcaaaacttgcgaataaatatgtactagagaacacaacatcaacagaagtaattgataaatttaaagcagtttatcaaattttcagcgatgttttaggtgtaccgttaaaatctaaaaatgcagatgaattattggatgaagatgttgaaaaattaatcgaagagcgtaatgaagcaaggaaaaacaaagattttgcacgagcagatgagattcgagacatgctgaaatcacaaaacattatattagaagacacacctcaaggggttagatttaaacgtggatatcaacaagataatcacattaaattattgaatccattgaccttagcatatatgggagacgcagtcttagatcaatatgtacgtacctatatcgttttaaagcttaaaagtaagcctaataaactacatcaaatgtctaaaaaatatgtatctgccaaaagtcaggcgcaaacgttagaatatttaatggagcaagaatggtttacagacgaagaaatggatattttgaagcgagggcgtaacgcgaaaagtcatactaaagctaaaaacactgatgttcaaacatatcgtaaaagttcagcgatagaagcagtgataggttttctttatttagaaaaaagagaagaacgattagaggcattattaaataaaataataacaatagtaaacgaaaggtagtgacgatgtggaagatacggttattgttggtaggcatgctgttagagaagcgattattactgggcatccgataaataagatattgattcaagaaggtattaaaaagcaacaaattaatgaaattttaaaaaatgcaaaagatcaaaaaattattgttcaaactgtaccaaaatctaaattagattttttagcaaatgcaccacatcagggtgttgcagcgcttattgcaccatatgaatatgctgacttcgatcaatttttaaaacagcaaaaagaaaaagaaggtttatcgacagtacttatattagacggcttagaagacccgcataacttgggatcaattttaagaacagccgatgcaacgggagttgatggtgttattattcctaaacgtcgttcagttacactaacgcaaacagttgcaaaagcctcaacaggtgcaattgaacatgtaccagttattcgagtgacaaatttagctaaaactatcgatgaactaaaagataatggcttttgggtagctggcactgaagctaataatgcaacagattatagaaatctagaagcggacatgtcattggctattgtaattggtagcgaaggacagggtatgagtcgcctagtaagtgataaatgcgatttttatattaagattccaatggttggacatgtaaacagtttgaatgcttcggttgcagcaagtttaatgatgtacgaagtatttcgaaaaagacatgatgttggagaaatataatgaaagaacgttacttaatcattgatggatacaatatgataggacaatcaccaacgctaagcgccattgcaaaagagaatttagaagaagctagaatgcaattaatagatgcaattgcaaattataatgcagttatttcagatgaaattatttgtgttttcgatgcttatgaccaatcgggtgttgaaagagaatacatgtatcatggcgttaaaacgatttttaccaaggaaaaagaaacagctgatagtttcatagaacgttatgtttatgaactttatgacaagcatactaagcatattgcagttgtaacaagtgatatgagtgagcaacatgctatctttggatcaggtgcatatagaatatcatctcgcgaaatgtggagagatttaaaagaaaatgaaattgatgtgagtaaatcattagatgatataagtgaaaacaagccaagaactcgaattccgttatcttctgaaatccttgcagaatttgaaaaaatacgaagaggacatcataagaaatga

SEQ ID NO: 16 - DNA, 15901 bp, Staphylococcus aureus
ctgagccctgtgaccacatcacgatatcaaggaggtgcacatcgtggctaaaaaagtagataaagttgttaaattacaaattcctgcaggtaaagcgaatccagcaccaccagttggtccagcattaggtcaagcaggtgtgaacatcatgggattctgtaaagagttcaatgcacgtactcaagatcaagcaggtttaattattccggtagaaatcagtgtttatgaagatcgttcatttacatttattacaaaaactccaccggctccagtattacttaaaaaagcagctggtattgaaaaaggttcaggcgaaccaaacaaaactaaagttgctacagtaactaaagatcaagtacgcgaaattgctaacagcaaaatgcaagacttaaacgctgctgacgaagaagcagctatgcgtattatcgaaggtactgcacgtagtatgggtatcgttgtagaataattttacgaatattaaatttgattacatgatttaaacgatgaagcagataacagagataataatgatgaattataaatataatctgaatgactagattaatgattgatttattcataagattaattcttctgttgtctgctcttaacttgcatatagcaagtaatgtgggaggaaattccgctaaaaccactaaaggaggaactataaatggctaaaaaaggtaaaaagtatcaagaagcagctagtaaagttgaccgtactcagcactacagtgttgaagaagcaattaaattagctaaagaaacaagcattgctaactttgacgcttctgttgaagttgcattccgtttaggaattgatacacgtaaaaatgaccaacaaatccgtggtgcagttgtattaccaaacggaactggtaaatcacaaagtgtattagtattcgctaaaggtgacaaaattgctgaagctgaagcagcaggtgctgactatgtaggtgaagcagaatacgttcaaaaaatccaacaaggttggttcgacttcgatgtagtagttgctacaccagacatgatgggtgaagttggtaaattaggtcgtgtattaggaccaaaaggtttaatgccaaaccctaaaactggaactgtaacaatggatgttaaaaaagctgttgaagaaatcaaagctggtaaagtagaatatcgtgctgaaaaagctggtatcgtacatgcatcaattggtaaagtttcatttactgatgaacaattaattgaaaacttcaatactttacaagatgtattagctaaagctaaaccatcatctgctaaaggtacatacttcaaatctgttgctgtaactacaacaatgggtcctggagttaaaattgatactgcaagtttcaaataataaatgatataaacaattacaggctgaaagaaatatctttcagtctgtaaaaatatattgacaataagtaatttccaagttatattacttattgtgattattttacctaagacagtaggagttatttataacttaaaatttatcctgccgaggctaaaattgacttgaacgtgatgatctatgatctttcaagcactttttgccgtgggtagaaagtgctttttttattaattttaaaaaaagcaccaaaaatttaaatggaggtgtctgaatgtctgctatcattgaagctaaaaaacaactagttgatgaaattgctgaggtactatcaaattcagtttcaacagtaatcgttgactatcgtggattaacagtagctgaagttactgacttacgttcacaattacgtgaagctggtgttgagtataaagtatacaaaaacactatggtacgtcgtgcagctgaaaaagctggtatcgaaggcttagatgaattcttaacaggtcctactgctattgcaacttcaagtgaagatgctgtagctgcagcgaaagtaatttctggatttgctaaagatcatgaagcattagaaattaaatcaggtgttatggaaggcaatgttattacagcagaagaagttaaaactgttggttcattaccttcacacgatggtcttgtatctatgcttttatcagtattacaagctcctgtacgcaacttcgcttatgcggttaaagctattggagaacaaaaagaagaaaacgctgaataatttttagcgtaaaaaaattaaaaataatggaggaattataaaatggctaatcatgaacaaatcattgaagcgattaaagaaatgtcagtattagaattaaacgacttagtaaaagcaattgaagaagaatttggtgtaactgcagctgctccagtagcagtagcaggtgcagctggtggcgctgacgctgcagcagaaaaaactgaatttgacgttgagttaacttcagctggttcatctaaaatcaaagttgttaaagctgttaaagaagcaactggtttaggattaaaagatgctaaagaattagtagacggagctcctaaagtaatcaaagaagctttacctaaagaagaagctgaaaaacttaaagaacaattagaagaagttggagctactgtagaattaaaataattcaagtatcttaaacttaataatcaaagttttatagcaagtattgctataatataatgattctttgagaagttaaaaccccgttattttgataacggggttttattcatttaaagactgagtgaaatgttataattataatgacgagttacaaagtgaagatgaggtggaataatgagtcattattacgatgaagatccaagtgtaattagcaatgaacaacgtattcaatatcaattaaaccatcataaaattgatttaataactgataacggagtgttttcgaaagataaagtagattatggttcagatgttcttgttcaaacttttttaaaagcgcatccacctggtccaagtaagcgaattgccgatgttggttgtggttacggaccaattggtttgatgattgctaaagtatcaccacatcattcaattacaatgctagatgttaatcacagagcgctagccttagttgaaaaaaacaaaaaattaaatggtattgataatgtgatcgtaaaggaaagtgatgctttgtctgctgtggaagacaaaagttttgattttattttaaccaatccaccaataagagcagggaaagaaaccgtgcatcgtatattcgagcaagcattacatagattagactcgaacggtgaactattcgttgtaattcagaagaagcaaggtatgccatctgcaaagaaaagaatgaatgaactttttggaaatgtagaagtggtaaataaagataaaggatattacattctgagaagtataaaagcttgaaatgaaatggatattctgttatagttatataatataaaaatttatgttcaataagtgtgtacttttacgttaaatagataagttaattaagaataaatatagaatcgaaaatggtgtcatcattagtgttgccgttttctttttgtctttttattaatatgcttatggtatttagctaaaagcggatcacataatttttgaggggtgaatctgtttggcaggtcaagttgtccaatatggaagacatcgtaaacgtagaaactacgcgagaatttcagaagtattagaattaccaaacttaatagaaattcaaactaaatcttacgagtggttcctaagagaaggtttaatcgaaatgtttagagacatttctccaattgaagattttactggtaatttgtcattagagtttgtggattaccgtttaggagaaccaaaatatgatttagaagaatctaaaaaccgtgacgctacttatgctgcacctcttcgtgtaaaagtgcgtctaatcattaaagaaacaggagaagttaaagaacaagaagtctttatgggtgatttcccattaatgactgatacaggtacgttcgttatcaatggtgcagaacgtgtaatcgtatctcaattagttcgttcaccatccgtttatttcaatgaaaaaatcgacaaaaatggtcgtgaaaactatgatgcaacaattattccaaaccgtggtgcatggttagaatatgaaacagatgctaaagatgttgtatacgtacgtattgatagaacacgtaaactaccattaacagtattgttacgtgcattaggtttctcaagtgaccaagaaattgttgaccttttaggtgacaatgaatatttacgtaatactttagagaaagacggcactgaaaacactgaacaagcgttattagaaatctatgaacgtttacgtccaggtgaaccaccaactgttgaaaatgctaaaagtctattgtattcacgtttctttgatccaaaacgctatgacttagcaagcgtgggtcgttataaaacaaacaaaaaattacatttaaaacatcgtttatttaatcaaaaattagctgagccaattgtaaatactgaaactggtgaaattgtagttgaagaaggtacagtgcttgatcgtcgtaaaatcgacgaaatcatggatgtacttgaatcaaatgcaaacagcgaagtgtttgaattgcatggtagcgttatagacgagccagtagaaattcaatcaattaaagtatatgttcctaacgatgatgaaggtcgtacgacaactgtaattggtaatgctttccctgactcagaagttaaatgcattacaccagcagatatcattgcttcaatgagttacttctttaacttattaagcggtattggatatacagatgatattgaccatttaggtaaccgtcgtttacgttctgtaggtgaattactacaaaaccaattccgtatcggtttatcaagaatggaaagagttgtacgtgaaagaatgtcaattcaagatactgagtctatcacacctcaacaattaattaatattcgacctgttattgcatctattaaagaattctttggtagctctcaattatcacaattcatggaccaagcaaacccattagctgagttaacgtataaacgtcgtctatcagcattaggacctggtggtttaacacgtgaacgtgctcaaatggaagtacgtgacgttcactactctcactatggccgtatgtgtccaattgaaacacctgagggaccaaacattggattgattaactcattatcaagttatgcacgtgtaaatgaattcggctttattgaaacaccatatcgtaaagttgatttagatacacatgctatcactgatcaaattgactatttaacagctgacgaagaagatagctatgttgtagcacaagcaaactctaaattagatgaaaatggtcgtttcatggatgatgaagttgtatgtcgtttccgtggtaacaatacagttatggctaaagaaaaaatggattatatggatgtatcgccgaagcaagttgtttcagcagcgacagcatgtattccattcttagaaaacgatgactcaaaccgtgcattgatgggtgcgaacatgcaacgtcaagcagtgcctttgatgaatccagaagcaccatttgttggaacaggtatggaacacgttgcagcacgtgattctggtgcagctattacagctaagcacagaggtcgtgttgaacatgttgaatctaatgaaattcttgtacgtcgtctagttgaagagaacggcgttgagcatgaaggtgaattagatcgctatccattagctaaatttaaacgttcaaactcaggtacatgttacaaccaacgtccaatcgttgcagttggagatgttgttgagtataacgagattttagcagatggaccatctatggaattaggagaaatggcattaggtagaaacgtagtagttggtttcatgacttgggacggttacaactatgaggatgccgttatcatgagtgaaagacttgtgaaagatgacgtgtatacttctattcatattgaagagtatgaatcagaagcacgtgatactaagttaggacctgaagaaatcacaagagatattcctaatgtttctgaaagtgcacttaagaacttagacgatcgtggtatcgtttatattggtgcagaagtaaaagatggagatattttagttggtaaagtaacgcctaaaggtgtaactgagttaactgccgaagaaagattgttacatgcaatctttggtgaaaaagcacgtgaagttagagatacttcattacgtgtacctcacggcgctggcggtatcgttcttgatgtaaaagtattcaatcgtgaagaaggcgacgatacattatcacctggtgtaaaccaattagtacgtgtatatatcgttcaaaaacgtaaaattcatgttggtgataagatgtgtggtcgacatggtaacaaaggtgtcatttctaagattgttcctgaagaagatatgccttacttaccagatggacgtccgatcgatatcatgttaaatcctcttggtgtaccatctcgtatgaacatcggacaagtattagagctacacttaggtatggctgctaaaaatcttggtattcacgttgcatcaccagtatttgacggtgcaaacgatgacgatgtatggtcaacaattgaagaagctggtatggctcgtgatggtaaaactgtactttatgatggacgtacaggtgaaccattcgataaccgtatttcagtaggtgtaatgtacatgttgaaacttgcgcacatggttgatgataaattacatgcgcgttcaacaggaccatattcacttgttacacaacaaccacttggcggtaaagcgcaattcggtggacaacgtttcggtgagatggaggtatgggcacttgaagcatatggtgctgcatacacattacaagaaatcttaacttacaaatccgatgatacagtaggacgtgtgaaaacatacgaggctattgttaaaggtgaaaacatctctagaccaagtgttccagaatcattccgagtattgatgaaagaattacaaagtttaggtttagatgtaaaagttatggatgagcaagataatgaaatcgaaatgacagacgttgatgacgatgatgttgtagaacgcaaagtagatttacaacaaaatgatgctcctgaaacacaaaaagaagttactgattaatacgcaatttacaaaacaggcaaaaagatactaagctgaattttattgatgattcagtttagtactttaagccattttaaataaatgcaaatcaatcaaatagcacagctaatctaaattgaaggaggtaggctccttgattgatgtaaataatttccattatatgaaaataggattggcttcacctgaaaaaatccgttcttggtcttttggtgaagttaaaaaacctgaaacaatcaactaccgtacattaaaacctgaaaaagatggtctattctgtgaaagaattttcggacctacaaaagactgggaatgtagttgtggtaaatacaaacgtgttcgctacaaaggcatggtctgtgacagatgtggagttgaagtaactaaatctaaagtacgtcgtgaaagaatgggtcacattgaacttgctgctccagtttctcacatttggtatttcaaaggtataccaagtcgtatgggattattacttgacatgtcaccaagagcattagaagaggttatttactttgcttcttatgttgttgtagatccaggtccaactggtttagaaaagaaaactttattatctgaagctgaattcagagattattatgataaatacccaggtcaattcgttgcaaaaatgggtgcagaaggtattaaagatttacttgaagagattgatcttgacgaagaacttaaattgttacgcgatgagttggaatcagctactggtcaaagacttactcgtgcaattaaacgtttagaagttgttgaatcattccgtaattcaggtaacaaaccttcatggatgattttagatgtacttccaatcatcccaccagaaattcgtccaatggttcaattagatggtggacgatttgcaacaagtgacttaaacgacttataccgtcgtgtaattaatcgaaataatcgtttgaaacgtttattagatttaggtgcacctggtatcatcgttcaaaacgaaaaacgtatgttacaagaagccgttgacgctttaattgataatggtcgtcgtggtcgtccagttactggcccaggtaaccgtccattaaaatctttatctcatatgttaaaaggtaaacaaggtcgtttccgtcaaaacttacttggtaaacgtgtcgactattcaggacgttcagttattgcagtaggtccaagcttgaaaatgtaccaatgtggtttaccaaaagaaatggcacttgaactatttaaaccattcgtaatgaaagaattagttcaacgtgaaattgcaactaacattaaaaatgcgaagagtaaaatcgaacgtatggatgatgaagtttgggacgtattggaagaagtaattagagaacatcctgtattacttaaccgtgcaccaacacttcatagacttggtattcaagcatttgaaccaactttagttgaaggtcgtgcgattcgtctacatccacttgtaacaacagcttataatgctgactttgacggtgaccaaatggcggttcacgttcctttatcaaaagaggcacaagctgaagcaagaatgttgatgttagcagcacaaaacatcttgaaccctaaagatggtaaacctgtagttacaccatcacaagatatggtacttggtaactattaccttactttagaaagaaaagatgcagtaaatacaggcgcaatctttaataatacaaatgaagtattaaaagcatatgcaaatggctttgtacatttacacactagaattggtgtacatgcaagttcgttcaataatccaacatttactgaagaacaaaacaaaaagattcttgctacgtcagtaggtaaaattatattcaatgaaatcattccagattcatttgcttatattaatgaacctacgcaagaaaacttagaaagaaagacaccaaacagatatttcatcgatcctacaactttaggtgaaggtggattaaaagaatactttgaaaatgaagaattaattgaacctttcaacaaaaaattcttaggtaatattattgcagaagtattcaacagatttagcatcactgatacatcaatgatgttagaccgtatgaaagacttaggattcaaattctcatctaaagctggtattacagtaggtgttgctgatatcgtagtattacctgataagcaacaaatacttgatgagcatgaaaaattagtcgacagaattacaaaacaattcaaccgtggtttaatcactgaagaagaaagatataatgcagttgttgaaatttggacagatgcaaaagatcaaattcaaggtgaattgatgcaatcacttgataaaactaacccaatcttcatgatgagtgattcaggtgcccgtggtaacgcatctaactttacacagttagcaggtatgcgtggattgatggccgcaccatctggtaagattatcgaattaccaatcacatcttcattccgtgaaggtttaacagtacttgaatacttcatctcaactcacggtgcacgtaaaggtcttgccgatacagcacttaaaacagctgactcaggatatcttactcgtcgtcttgttgacgtggcacaagatgttattgttcgtgaagaagactgtggtactgatagaggtttattagtttctgatattaaagaaggtacagaaatgattgaaccatttatcgaacgtattgaaggtcgttattctaaagaaacaattcgtcatcctgaaactgatgaaataatcattcgtcctgatgaattaattacacctgaaattgctaagaaaattacagatgctggtattgaacaaatgtatattcgctcagcatttacttgtaacgcacgacatggtgtttgtgaaaaatgttacggtaaaaaccttgctactggtgaaaaagttgaagttggtgaagcagttggtacaattgcagcccaatctatcggtgaaccaggtacacagcttacaatgcgtacattccatacaggtggggtagcaggtagcgatatcacacaaggtcttcctcgtattcaagagattttcgaagcacgtaaccctaaaggtcaagcggtaattacggaaatcgaaggtgtcgtagaagatattaaattagcaaaagatagacaacaagaaattgttgttaaaggtgctaatgaaacaagatcataccttgcttcaggtacttcaagaattattgtagaaatcggtcaaccagttcaacgtggtgaagtattaactgaaggttctattgaacctaagaattacttatctgttgctggattaaacgcgactgaaagctacttattaaaagaagtacaaaaagtttaccgtatgcaaggtgtagaaatcgacgataaacacgttgaggttatggttcgacaaatgttacgtaaagttagaattatcgaagcaggtgatacgaagttattaccaggttcattagttgatattcataacttcacagatgcaaatagagaagcatttaaacaccgtaagcgtcctgcaacagctaaaccagtattacttggtattactaaagcatcacttgaaacagaaagtttcttatctgcagcatcattccaagaaacaacaagagttcttacagatgcagcaattaaaggtaagcgtgatgacttattaggtcttaaagaaaacgtaattattggtaagttaattccagctggtactggtatgagacgttatagcgacgtaaaatacgaaaaaacagctaaaccagttgcagaagttgaatctcaaactgaagtaacggaataacaagtatataacagaggctaatgctttagcctcttgttatttttatgtaaattatttgatttaatgttgacgaattctcttgttcaatgttaaaatattaaaggttgatgcaagcagaactttggaggataaattattgtctaaggaaaaagttgcacgctttaacaaacaacattttgtagttggtcttaaagaaacgcttaaagcgttaaagaaagatcaagttacatctttgattattgctgaagacgttgaagtatatttaatgactcgcgtgttaagccaaatcaatcagaaaaatatacctgtatcttttttcaaaagcaaacatgctttgggtaaacatgtaggtattaacgtcaatgcgacaatagtagcattgattaaatgagaattagtaagtgttttacttactaaattttatttaacctaaaaatgaaccacctggatgtgtgggattaaaaagtgaagagaggaggacatatcacatgccaactattaaccaattagtacgtaaaccaagacaaagcaaaatcaaaaaatcagattctccagctttaaataaaggtttcaacagtaaaaagaaaaaatttactgacttaaactcaccacaaaaacgtggtgtatgtactcgtgtaggtacaatgacacctaaaaaacctaactcagcgttacgtaaatatgcacgtgtgcgtttatcaaacaacatcgaaattaacgcatacatccctggtatcggacataacttacaagaacacagtgttgtacttgtacgtggtggacgtgtaaaagacttaccaggtgtgcgttaccatattgtacgtggagcacttgatacttcaggtgttgacggacgtagacaaggtcgttcattatacggaactaagaaacctaaaaactaagaatttagtttttaattaaatcttaaacttaaaatatttaatataaggaagggaggatttacattatgcctcgtaaaggatcagtacctaaaagagacgtattaccagatccaattcataactctaagttagtaactaaattaattaacaaaattatgttagatggtaaacgtggaacagcacaaagaattctttattcagcattcgacctagttgaacaacgcagtggtcgtgatgcattagaagtattcgaagaagcaatcaacaacattatgccagtattagaagttaaagctcgtcgtgtaggtggttctaactatcaagtaccagtagaagttcgtccagagcgtcgtactactttaggtttacgttggttagttaactatgcacgtcttcgtggtgaaaaaacgatggaagatcgtttagctaacgaaattttagatgcagcaaataatacaggtggtgccgttaagaaacgtgaggacactcacaaaatggctgaagcaaacaaagcatttgctcactaccgttggtaagataaaagcttttaccctgagtgtgttctatattaatgaattttcattaagcgttcatgcttagggcatcgccatatctatcgtatttattcagtaatataaactggaaggagaaaaaatacatggctagagaattttcattagaaaaaactcgtaatatcggtatcatggctcacattgatgctggtaaaacgactacgactgaacgtattctttattacactggccgtatccacaaaattggtgaaacacacgaaggtgcttcacaaatggactggatggagcaagaacaagaccgtggtattactatcacatctgctgcaacaacagcagcttgggaaggtcaccgtgtaaacattatcgatacacctggacacgtagacttcactgtagaagttgaacgttcattacgtgtacttgacggagcagttacagtacttgatgcacaatcaggtgttgaaccacaaactgaaacagtttggcgtcaggctacaacttatggtgttccacgtatcgtatttgtaaacaaaatggacaaattaggtgctaacttcgaatactctgtaagtacattacatgatcgtttacaagctaacgctgctccaatccaattaccaattggtgcggaagacgaattcgaagcaatcattgacttagttgaaatgaaatgtttcaaatatacaaatgatttaggtactgaaattgaagaaattgaaattcctgaagaccacttagatagagctgaagaagctcgtgctagcttaatcgaagcagttgcagaaactagcgacgaattaatggaaaaatatcttggtgacgaagaaatttcagtttctgaattaaaagaagctatccgccaagctactactaacgtagaattctacccagtactttgtggtacagctttcaaaaacaaaggtgttcaattaatgcttgacgctgtaattgattacttaccttcaccactagacgttaaaccaattattggtcaccgtgctagcaaccctgaagaagaagtaatcgcgaaagcagacgattcagctgaattcgctgcattagcgttcaaagttatgactgacccttatgttggtaaattaacattcttccgtgtgtattcaggtacaatgacatctggttcatacgttaagaactctactaaaggtaaacgtgaacgtgtaggtcgtttattacaaatgcacgctaactcacgtcaagaaatcgatactgtatactctggagatatcgcggctgcggtaggtcttaaagatacaggtactggtgatactttatgtggtgagaaaaatgacattatcttggaatcaatggaattcccagagccagttattcacttatcagtagagccaaaatctaaagctgaccaagataaaatgactcaagctttagttaaattacaagaagaagacccaacattccatgcacacactgacgaagaaactggacaagttatcatcggtggtatgggtgagcttcacttagacatcttagtagaccgtatgaagaaagaattcaacgttgaatgtaacgtaggtgctccaatggtttcatatcgtgaaacattcaaatcatctgcacaagttcaaggtaaattctctcgtcaatctggtggtcgtggtcaatacggtgatgttcacattgaattcacaccaaacgaaacaggcgcaggtttcgaattcgaaaacgctatcgttggtggtgtagttcctcgtgaatacattccatcagtagaagctggtcttaaagatgctatggaaaatggtgtcttagcaggttatcctttaattgatgttaaagctaaattatatgatggttcataccatgatgtcgattcatctgaaatggccttcaaaattgctgcatcattagcacttaaagaagctgctaaaaaatgtgatcctgtaatcttagaaccaatgatgaaagtaactattgaaatgcctgaagagtacatgggtgatatcatgggtgacgtaacatctcgtcgtggacgtgttgatggtatggaacctcgtggtaatgcacaagttgttaatgcttatgtaccactttcagaaatgttcggttatgcaacatcattacgttcaaacactcaaggtcgcggtacttacactatgtacttcgatcactatgctgaagttccaaaatcaatcgctgaagatattatcaagaaaaataaaggtgaataatataacttgttttgactagctagcctaggttaaaatacaaggtgagcttaaatgtaagctatcatctttatagtttgattttttggggtgaatgcattataaaagaattgtaaaattctttttgcatcgctataaataatttctcatgatggtgagaaactatcatgagagataaatttaaatattatttttaattagaataggagagattttataatggcaaaagaaaaattcgatcgttctaaagaacatgccaatatcggtactatcggtcacgttgaccatggtaaaacaacattaacagcagcaatcgctactgtattagcaaaaaatggtgactcagttgcacaatcatatgacatgattgacaacgctccagaagaaaaagaacgtggtatcacaatcaatacttctcacattgagtaccaaactgacaaacgtcactacgctcacgttgactgcccaggacacgctgactacgttaaaaacatgatcactggtgctgctcaaatggacggcggtatcttagtagtatctgctgctgacggtccaatgccacaaactcgtgaacacattcttttatcacgtaacgttggtgtaccagcattagtagtattcttaaacaaagttgacatggttgacgatgaagaattattagaattagtagaaatggaagttcgtgacttattaagcgaatatgacttcccaggtgacgatgtacctgtaatcgctggttcagcattaaaagctttagaaggcgatgctcaatacgaagaaaaaatcttagaattaatggaagctgtagatacttacattccaactccagaacgtgattctgacaaaccattcatgatgccagttgaggacgtattctcaatcactggtcgtggtactgttgctacaggccgtgttgaacgtggtcaaatcaaagttggtgaagaagttgaaatcatcggtttacatgacacatctaaaacaactgttacaggtgttgaaatgttccgtaaattattagactacgctgaagctggtgacaacattggtgcattattacgtggtgttgctcgtgaagacgtacaacgtggtcaagtattagctgctcctggttcaattacaccacatactgaatttaaagcagaagtatacgtattatcaaaagacgaaggtggacgtcacactccattcttctcaaactatcgtccacaattctatttccgtactactgacgtaactggtgttgttcacttaccagaaggtactgaaatggtaatgcctggtgataacgttgaaatgacagtagaattaatcgctccaatcgcgattgaagacggtactcgtttctcaatccgcgaaggtggacgtactgtaggatcaggcgttgttactgaaatcattaaataa

SEQ ID NO: 17 - DNA, 2549 bp, Staphylococcus aureus
ctgagccctgtgaccacatcacgatatcaaggaggtgcacatcgtggctaaaaaagtagataaagttgttaaattacaaattcctgcaggtaaagcgaatccagcaccaccagttggtccagcattaggtcaagcaggtgtgaacatcatgggattctgtaaagagttcaatgcacgtactcaagatcaagcaggtttaattattccggtagaaatcagtgtttatgaagatcgttcatttacatttattacaaaaactccaccggctccagtattacttaaaaaagcagctggtattgaaaaaggttcaggcgaaccaaacaaaactaaagttgctacagtaactaaagatcaagtacgcgaaattgctaacagcaaaatgcaagacttaaacgctgctgacgaagaagcagctatgcgtattatcgaaggtactgcacgtagtatgggtatcgttgtagaataattttacgaatattaaatttgattacatgatttaaacgatgaagcagataacagagataataatgatgaattataaatataatctgaatgactagattaatgattgatttattcataagattaattcttctgttgtctgctcttaacttgcatatagcaagtaatgtgggaggaaattccgctaaaaccactaaaggaggaactataaatggctaaaaaaggtaaaaagtatcaagaagcagctagtaaagttgaccgtactcagcactacagtgttgaagaagcaattaaattagctaaagaaacaagcattgctaactttgacgcttctgttgaagttgcattccgtttaggaattgatacacgtaaaaatgaccaacaaatccgtggtgcagttgtattaccaaacggaactggtaaatcacaaagtgtattagtattcgctaaaggtgacaaaattgctgaagctgaagcagcaggtgctgactatgtaggtgaagcagaatacgttcaaaaaatccaacaaggttggttcgacttcgatgtagtagttgctacaccagacatgatgggtgaagttggtaaattaggtcgtgtattaggaccaaaaggtttaatgccaaaccctaaaactggaactgtaacaatggatgttaaaaaagctgttgaagaaatcaaagctggtaaagtagaatatcgtgctgaaaaagctggtatcgtacatgcatcaattggtaaagtttcatttactgatgaacaattaattgaaaacttcaatactttacaagatgtattagctaaagctaaaccatcatctgctaaaggtacatacttcaaatctgttgctgtaactacaacaatgggtcctggagttaaaattgatactgcaagtttcaaataataaatgatataaacaattacaggctgaaagaaatatctttcagtctgtaaaaatatattgacaataagtaatttccaagttatattacttattgtgattattttacctaagacagtaggagttatttataacttaaaatttatcctgccgaggctaaaattgacttgaacgtgatgatctatgatctttcaagcactttttgccgtgggtagaaagtgctttttttattaattttaaaaaaagcaccaaaaatttaaatggaggtgtctgaatgtctgctatcattgaagctaaaaaacaactagttgatgaaattgctgaggtactatcaaattcagtttcaacagtaatcgttgactatcgtggattaacagtagctgaagttactgacttacgttcacaattacgtgaagctggtgttgagtataaagtatacaaaaacactatggtacgtcgtgcagctgaaaaagctggtatcgaaggcttagatgaattcttaacaggtcctactgctattgcaacttcaagtgaagatgctgtagctgcagcgaaagtaatttctggatttgctaaagatcatgaagcattagaaattaaatcaggtgttatggaaggcaatgttattacagcagaagaagttaaaactgttggttcattaccttcacacgatggtcttgtatctatgcttttatcagtattacaagctcctgtacgcaacttcgcttatgcggttaaagctattggagaacaaaaagaagaaaacgctgaataatttttagcgtaaaaaaattaaaaataatggaggaattataaaatggctaatcatgaacaaatcattgaagcgattaaagaaatgtcagtattagaattaaacgacttagtaaaagcaattgaagaagaatttggtgtaactgcagctgctccagtagcagtagcaggtgcagctggtggcgctgacgctgcagcagaaaaaactgaatttgacgttgagttaacttcagctggttcatctaaaatcaaagttgttaaagctgttaaagaagcaactggtttaggattaaaagatgctaaagaattagtagacggagctcctaaagtaatcaaagaagctttacctaaagaagaagctgaaaaacttaaagaacaattagaagaagttggagctactgtagaattaaaataa

SEQ ID NO: 18 - DNA, 7312 bp, Staphylococcus aureus
ttggcaggtcaagttgtccaatatggaagacatcgtaaacgtagaaactacgcgagaatttcagaagtattagaattaccaaacttaatagaaattcaaactaaatcttacgagtggttcctaagagaaggtttaatcgaaatgtttagagacatttctccaattgaagattttactggtaatttgtcattagagtttgtggattaccgtttaggagaaccaaaatatgatttagaagaatctaaaaaccgtgacgctacttatgctgcacctcttcgtgtaaaagtgcgtctaatcattaaagaaacaggagaagttaaagaacaagaagtctttatgggtgatttcccattaatgactgatacaggtacgttcgttatcaatggtgcagaacgtgtaatcgtatctcaattagttcgttcaccatccgtttatttcaatgaaaaaatcgacaaaaatggtcgtgaaaactatgatgcaacaattattccaaaccgtggtgcatggttagaatatgaaacagatgctaaagatgttgtatacgtacgtattgatagaacacgtaaactaccattaacagtattgttacgtgcattaggtttctcaagtgaccaagaaattgttgaccttttaggtgacaatgaatatttacgtaatactttagagaaagacggcactgaaaacactgaacaagcgttattagaaatctatgaacgtttacgtccaggtgaaccaccaactgttgaaaatgctaaaagtctattgtattcacgtttctttgatccaaaacgctatgacttagcaagcgtgggtcgttataaaacaaacaaaaaattacatttaaaacatcgtttatttaatcaaaaattagctgagccaattgtaaatactgaaactggtgaaattgtagttgaagaaggtacagtgcttgatcgtcgtaaaatcgacgaaatcatggatgtacttgaatcaaatgcaaacagcgaagtgtttgaattgcatggtagcgttatagacgagccagtagaaattcaatcaattaaagtatatgttcctaacgatgatgaaggtcgtacgacaactgtaattggtaatgctttccctgactcagaagttaaatgcattacaccagcagatatcattgcttcaatgagttacttctttaacttattaagcggtattggatatacagatgatattgaccatttaggtaaccgtcgtttacgttctgtaggtgaattactacaaaaccaattccgtatcggtttatcaagaatggaaagagttgtacgtgaaagaatgtcaattcaagatactgagtctatcacacctcaacaattaattaatattcgacctgttattgcatctattaaagaattctttggtagctctcaattatcacaattcatggaccaagcaaacccattagctgagttaacgtataaacgtcgtctatcagcattaggacctggtggtttaacacgtgaacgtgctcaaatggaagtacgtgacgttcactactctcactatggccgtatgtgtccaattgaaacacctgagggaccaaacattggattgattaactcattatcaagttatgcacgtgtaaatgaattcggctttattgaaacaccatatcgtaaagttgatttagatacacatgctatcactgatcaaattgactatttaacagctgacgaagaagatagctatgttgtagcacaagcaaactctaaattagatgaaaatggtcgtttcatggatgatgaagttgtatgtcgtttccgtggtaacaatacagttatggctaaagaaaaaatggattatatggatgtatcgccgaagcaagttgtttcagcagcgacagcatgtattccattcttagaaaacgatgactcaaaccgtgcattgatgggtgcgaacatgcaacgtcaagcagtgcctttgatgaatccagaagcaccatttgttggaacaggtatggaacacgttgcagcacgtgattctggtgcagctattacagctaagcacagaggtcgtgttgaacatgttgaatctaatgaaattcttgtacgtcgtctagttgaagagaacggcgttgagcatgaaggtgaattagatcgctatccattagctaaatttaaacgttcaaactcaggtacatgttacaaccaacgtccaatcgttgcagttggagatgttgttgagtataacgagattttagcagatggaccatctatggaattaggagaaatggcattaggtagaaacgtagtagttggtttcatgacttgggacggttacaactatgaggatgccgttatcatgagtgaaagacttgtgaaagatgacgtgtatacttctattcatattgaagagtatgaatcagaagcacgtgatactaagttaggacctgaagaaatcacaagagatattcctaatgtttctgaaagtgcacttaagaacttagacgatcgtggtatcgtttatattggtgcagaagtaaaagatggagatattttagttggtaaagtaacgcctaaaggtgtaactgagttaactgccgaagaaagattgttacatgcaatctttggtgaaaaagcacgtgaagttagagatacttcattacgtgtacctcacggcgctggcggtatcgttcttgatgtaaaagtattcaatcgtgaagaaggcgacgatacattatcacctggtgtaaaccaattagtacgtgtatatatcgttcaaaaacgtaaaattcatgttggtgataagatgtgtggtcgacatggtaacaaaggtgtcatttctaagattgttcctgaagaagatatgccttacttaccagatggacgtccgatcgatatcatgttaaatcctcttggtgtaccatctcgtatgaacatcggacaagtattagagctacacttaggtatggctgctaaaaatcttggtattcacgttgcatcaccagtatttgacggtgcaaacgatgacgatgtatggtcaacaattgaagaagctggtatggctcgtgatggtaaaactgtactttatgatggacgtacaggtgaaccattcgataaccgtatttcagtaggtgtaatgtacatgttgaaacttgcgcacatggttgatgataaattacatgcgcgttcaacaggaccatattcacttgttacacaacaaccacttggcggtaaagcgcaattcggtggacaacgtttcggtgagatggaggtatgggcacttgaagcatatggtgctgcatacacattacaagaaatcttaacttacaaatccgatgatacagtaggacgtgtgaaaacatacgaggctattgttaaaggtgaaaacatctctagaccaagtgttccagaatcattccgagtattgatgaaagaattacaaagtttaggtttagatgtaaaagttatggatgagcaagataatgaaatcgaaatgacagacgttgatgacgatgatgttgtagaacgcaaagtagatttacaacaaaatgatgctcctgaaacacaaaaagaagttactgattaatacgcaatttacaaaacaggcaaaaagatactaagctgaattttattgatgattcagtttagtactttaagccattttaaataaatgcaaatcaatcaaatagcacagctaatctaaattgaaggaggtaggctccttgattgatgtaaataatttccattatatgaaaataggattggcttcacctgaaaaaatccgttcttggtcttttggtgaagttaaaaaacctgaaacaatcaactaccgtacattaaaacctgaaaaagatggtctattctgtgaaagaattttcggacctacaaaagactgggaatgtagttgtggtaaatacaaacgtgttcgctacaaaggcatggtctgtgacagatgtggagttgaagtaactaaatctaaagtacgtcgtgaaagaatgggtcacattgaacttgctgctccagtttctcacatttggtatttcaaaggtataccaagtcgtatgggattattacttgacatgtcaccaagagcattagaagaggttatttactttgcttcttatgttgttgtagatccaggtccaactggtttagaaaagaaaactttattatctgaagctgaattcagagattattatgataaatacccaggtcaattcgttgcaaaaatgggtgcagaaggtattaaagatttacttgaagagattgatcttgacgaagaacttaaattgttacgcgatgagttggaatcagctactggtcaaagacttactcgtgcaattaaacgtttagaagttgttgaatcattccgtaattcaggtaacaaaccttcatggatgattttagatgtacttccaatcatcccaccagaaattcgtccaatggttcaattagatggtggacgatttgcaacaagtgacttaaacgacttataccgtcgtgtaattaatcgaaataatcgtttgaaacgtttattagatttaggtgcacctggtatcatcgttcaaaacgaaaaacgtatgttacaagaagccgttgacgctttaattgataatggtcgtcgtggtcgtccagttactggcccaggtaaccgtccattaaaatctttatctcatatgttaaaaggtaaacaaggtcgtttccgtcaaaacttacttggtaaacgtgtcgactattcaggacgttcagttattgcagtaggtccaagcttgaaaatgtaccaatgtggtttaccaaaagaaatggcacttgaactatttaaaccattcgtaatgaaagaattagttcaacgtgaaattgcaactaacattaaaaatgcgaagagtaaaatcgaacgtatggatgatgaagtttgggacgtattggaagaagtaattagagaacatcctgtattacttaaccgtgcaccaacacttcatagacttggtattcaagcatttgaaccaactttagttgaaggtcgtgcgattcgtctacatccacttgtaacaacagcttataatgctgactttgacggtgaccaaatggcggttcacgttcctttatcaaaagaggcacaagctgaagcaagaatgttgatgttagcagcacaaaacatcttgaaccctaaagatggtaaacctgtagttacaccatcacaagatatggtacttggtaactattaccttactttagaaagaaaagatgcagtaaatacaggcgcaatctttaataatacaaatgaagtattaaaagcatatgcaaatggctttgtacatttacacactagaattggtgtacatgcaagttcgttcaataatccaacatttactgaagaacaaaacaaaaagattcttgctacgtcagtaggtaaaattatattcaatgaaatcattccagattcatttgcttatattaatgaacctacgcaagaaaacttagaaagaaagacaccaaacagatatttcatcgatcctacaactttaggtgaaggtggattaaaagaatactttgaaaatgaagaattaattgaacctttcaacaaaaaattcttaggtaatattattgcagaagtattcaacagatttagcatcactgatacatcaatgatgttagaccgtatgaaagacttaggattcaaattctcatctaaagctggtattacagtaggtgttgctgatatcgtagtattacctgataagcaacaaatacttgatgagcatgaaaaattagtcgacagaattacaaaacaattcaaccgtggtttaatcactgaagaagaaagatataatgcagttgttgaaatttggacagatgcaaaagatcaaattcaaggtgaattgatgcaatcacttgataaaactaacccaatcttcatgatgagtgattcaggtgcccgtggtaacgcatctaactttacacagttagcaggtatgcgtggattgatggccgcaccatctggtaagattatcgaattaccaatcacatcttcattccgtgaaggtttaacagtacttgaatacttcatctcaactcacggtgcacgtaaaggtcttgccgatacagcacttaaaacagctgactcaggatatcttactcgtcgtcttgttgacgtggcacaagatgttattgttcgtgaagaagactgtggtactgatagaggtttattagtttctgatattaaagaaggtacagaaatgattgaaccatttatcgaacgtattgaaggtcgttattctaaagaaacaattcgtcatcctgaaactgatgaaataatcattcgtcctgatgaattaattacacctgaaattgctaagaaaattacagatgctggtattgaacaaatgtatattcgctcagcatttacttgtaacgcacgacatggtgtttgtgaaaaatgttacggtaaaaaccttgctactggtgaaaaagttgaagttggtgaagcagttggtacaattgcagcccaatctatcggtgaaccaggtacacagcttacaatgcgtacattccatacaggtggggtagcaggtagcgatatcacacaaggtcttcctcgtattcaagagattttcgaagcacgtaaccctaaaggtcaagcggtaattacggaaatcgaaggtgtcgtagaagatattaaattagcaaaagatagacaacaagaaattgttgttaaaggtgctaatgaaacaagatcataccttgcttcaggtacttcaagaattattgtagaaatcggtcaaccagttcaacgtggtgaagtattaactgaaggttctattgaacctaagaattacttatctgttgctggattaaacgcgactgaaagctacttattaaaagaagtacaaaaagtttaccgtatgcaaggtgtagaaatcgacgataaacacgttgaggttatggttcgacaaatgttacgtaaagttagaattatcgaagcaggtgatacgaagttattaccaggttcattagttgatattcataacttcacagatgcaaatagagaagcatttaaacaccgtaagcgtcctgcaacagctaaaccagtattacttggtattactaaagcatcacttgaaacagaaagtttcttatctgcagcatcattccaagaaacaacaagagttcttacagatgcagcaattaaaggtaagcgtgatgacttattaggtcttaaagaaaacgtaattattggtaagttaattccagctggtactggtatgagacgttatagcgacgtaaaatacgaaaaaacagctaaaccagttgcagaagttgaatctcaaactgaagtaacggaataa

SEQ ID NO: 19 - DNA, 4555 bp, Staphylococcus aureus
atgccaactattaaccaattagtacgtaaaccaagacaaagcaaaatcaaaaaatcagattctccagctttaaataaaggtttcaacagtaaaaagaaaaaatttactgacttaaactcaccacaaaaacgtggtgtatgtactcgtgtaggtacaatgacacctaaaaaacctaactcagcgttacgtaaatatgcacgtgtgcgtttatcaaacaacatcgaaattaacgcatacatccctggtatcggacataacttacaagaacacagtgttgtacttgtacgtggtggacgtgtaaaagacttaccaggtgtgcgttaccatattgtacgtggagcacttgatacttcaggtgttgacggacgtagacaaggtcgttcattatacggaactaagaaacctaaaaactaagaatttagtttttaattaaatcttaaacttaaaatatttaatataaggaagggaggatttacattatgcctcgtaaaggatcagtacctaaaagagacgtattaccagatccaattcataactctaagttagtaactaaattaattaacaaaattatgttagatggtaaacgtggaacagcacaaagaattctttattcagcattcgacctagttgaacaacgcagtggtcgtgatgcattagaagtattcgaagaagcaatcaacaacattatgccagtattagaagttaaagctcgtcgtgtaggtggttctaactatcaagtaccagtagaagttcgtccagagcgtcgtactactttaggtttacgttggttagttaactatgcacgtcttcgtggtgaaaaaacgatggaagatcgtttagctaacgaaattttagatgcagcaaataatacaggtggtgccgttaagaaacgtgaggacactcacaaaatggctgaagcaaacaaagcatttgctcactaccgttggtaagataaaagcttttaccctgagtgtgttctatattaatgaattttcattaagcgttcatgcttagggcatcgccatatctatcgtatttattcagtaatataaactggaaggagaaaaaatacatggctagagaattttcattagaaaaaactcgtaatatcggtatcatggctcacattgatgctggtaaaacgactacgactgaacgtattctttattacactggccgtatccacaaaattggtgaaacacacgaaggtgcttcacaaatggactggatggagcaagaacaagaccgtggtattactatcacatctgctgcaacaacagcagcttgggaaggtcaccgtgtaaacattatcgatacacctggacacgtagacttcactgtagaagttgaacgttcattacgtgtacttgacggagcagttacagtacttgatgcacaatcaggtgttgaaccacaaactgaaacagtttggcgtcaggctacaacttatggtgttccacgtatcgtatttgtaaacaaaatggacaaattaggtgctaacttcgaatactctgtaagtacattacatgatcgtttacaagctaacgctgctccaatccaattaccaattggtgcggaagacgaattcgaagcaatcattgacttagttgaaatgaaatgtttcaaatatacaaatgatttaggtactgaaattgaagaaattgaaattcctgaagaccacttagatagagctgaagaagctcgtgctagcttaatcgaagcagttgcagaaactagcgacgaattaatggaaaaatatcttggtgacgaagaaatttcagtttctgaattaaaagaagctatccgccaagctactactaacgtagaattctacccagtactttgtggtacagctttcaaaaacaaaggtgttcaattaatgcttgacgctgtaattgattacttaccttcaccactagacgttaaaccaattattggtcaccgtgctagcaaccctgaagaagaagtaatcgcgaaagcagacgattcagctgaattcgctgcattagcgttcaaagttatgactgacccttatgttggtaaattaacattcttccgtgtgtattcaggtacaatgacatctggttcatacgttaagaactctactaaaggtaaacgtgaacgtgtaggtcgtttattacaaatgcacgctaactcacgtcaagaaatcgatactgtatactctggagatatcgcggctgcggtaggtcttaaagatacaggtactggtgatactttatgtggtgagaaaaatgacattatcttggaatcaatggaattcccagagccagttattcacttatcagtagagccaaaatctaaagctgaccaagataaaatgactcaagctttagttaaattacaagaagaagacccaacattccatgcacacactgacgaagaaactggacaagttatcatcggtggtatgggtgagcttcacttagacatcttagtagaccgtatgaagaaagaattcaacgttgaatgtaacgtaggtgctccaatggtttcatatcgtgaaacattcaaatcatctgcacaagttcaaggtaaattctctcgtcaatctggtggtcgtggtcaatacggtgatgttcacattgaattcacaccaaacgaaacaggcgcaggtttcgaattcgaaaacgctatcgttggtggtgtagttcctcgtgaatacattccatcagtagaagctggtcttaaagatgctatggaaaatggtgtcttagcaggttatcctttaattgatgttaaagctaaattatatgatggttcataccatgatgtcgattcatctgaaatggccttcaaaattgctgcatcattagcacttaaagaagctgctaaaaaatgtgatcctgtaatcttagaaccaatgatgaaagtaactattgaaatgcctgaagagtacatgggtgatatcatgggtgacgtaacatctcgtcgtggacgtgttgatggtatggaacctcgtggtaatgcacaagttgttaatgcttatgtaccactttcagaaatgttcggttatgcaacatcattacgttcaaacactcaaggtcgcggtacttacactatgtacttcgatcactatgctgaagttccaaaatcaatcgctgaagatattatcaagaaaaataaaggtgaataatataacttgttttgactagctagcctaggttaaaatacaaggtgagcttaaatgtaagctatcatctttatagtttgattttttggggtgaatgcattataaaagaattgtaaaattctttttgcatcgctataaataatttctcatgatggtgagaaactatcatgagagataaatttaaatattatttttaattagaataggagagattttataatggcaaaagaaaaattcgatcgttctaaagaacatgccaatatcggtactatcggtcacgttgaccatggtaaaacaacattaacagcagcaatcgctactgtattagcaaaaaatggtgactcagttgcacaatcatatgacatgattgacaacgctccagaagaaaaagaacgtggtatcacaatcaatacttctcacattgagtaccaaactgacaaacgtcactacgctcacgttgactgcccaggacacgctgactacgttaaaaacatgatcactggtgctgctcaaatggacggcggtatcttagtagtatctgctgctgacggtccaatgccacaaactcgtgaacacattcttttatcacgtaacgttggtgtaccagcattagtagtattcttaaacaaagttgacatggttgacgatgaagaattattagaattagtagaaatggaagttcgtgacttattaagcgaatatgacttcccaggtgacgatgtacctgtaatcgctggttcagcattaaaagctttagaaggcgatgctcaatacgaagaaaaaatcttagaattaatggaagctgtagatacttacattccaactccagaacgtgattctgacaaaccattcatgatgccagttgaggacgtattctcaatcactggtcgtggtactgttgctacaggccgtgttgaacgtggtcaaatcaaagttggtgaagaagttgaaatcatcggtttacatgacacatctaaaacaactgttacaggtgttgaaatgttccgtaaattattagactacgctgaagctggtgacaacattggtgcattattacgtggtgttgctcgtgaagacgtacaacgtggtcaagtattagctgctcctggttcaattacaccacatactgaatttaaagcagaagtatacgtattatcaaaagacgaaggtggacgtcacactccattcttctcaaactatcgtccacaattctatttccgtactactgacgtaactggtgttgttcacttaccagaaggtactgaaatggtaatgcctggtgataacgttgaaatgacagtagaattaatcgctccaatcgcgattgaagacggtactcgtttctcaatccgcgaaggtggacgtactgtaggatcaggcgttgttactgaaatcattaaataa

SEQ ID NO: 20 - DNA, 1826 bp, Staphylococcus aureus
atggctgatttattaaatgtattaaaagacaaactttctggtaaaaacgttaaaatcgtattacctgaaggagaggacgaacgtgttctaacagctgcaacacaattacaagcaacagattatgttacaccaatcgtgttaggtgatgagactaaggttcaatctttagcgcaaaaacttgatcttgatatttctaatattgaattaattaatcctgcgacaagtgaattgaaagctgaattagttcaatcatttgttgaacgacgtaaaggtaaagcgactgaagaacaagcacaagaattattaaacaatgtgaactacttcggtacaatgcttgtttatgctggtaaagcagatggtttagttagtggtgcagcacattcaacaggagacactgtgcgtccagctttacaaatcatcaaaacgaaaccaggtgtatcaagaacatcaggtatcttctttatgattaaaggtgatgaacaatacatctttggtgattgtgcaatcaatccagaacttgattcacaaggacttgcagaaattgcagtagaaagtgcaaaatcagcattaagctttggcatggatccaaaagttgcaatgttaagcttttcaacaaaagggtctgctaaatcagacgacgtgacaaaagttcaagaagctgtcaaattagcacaacaaaaagctgaagaagaaaaattagaagcaatcattgatggcgaattccaatttgatgctgcgattgtaccaggtgttgctgagaaaaaagcgccaggtgctaaattacaaggtgatgcaaatgtctttgtattcccaagtttagaagctggtaatattggttacaaaattgcacaacgtttaggtggatatgatgcagttggtccagtattacaaggtttaaattctccagtaaatgacttatcacgtggctgctcaattgaagatgtatacaatctttcaattattacagcagcgcaagccttacaataacgatggatttagcgagtaaatattttaatggcgtcaactggcgatatatcgaccattcttctggattagaacctatgcaatctttcgcattcgatgatacattttgcgaaagtgtgggcaaagatatatcagataatgttgtgcgtacttggattcatcaacatactgttattcttggtattcatgattcaagattgccgtttttaaaagatggcattgattatttaacgaatgagattggttataatgccattgttagaaattctggtggcttaggtgtcgttctagatcaaggtgtattaaatatatcgctgatgttcaaaggacaaacagaaacaacgattgatgaagcgtttactgtgatgtacctcttaattagcaaaatgttcgaagatgagaatgttgatattgatacgatggaaattgaacattcttattgcccaggaaaatttgacttaagtatcgatggtaagaaatttgcaggcatatcgcaacgaagagttagaggcggtattgctgtacaaatttatctttgtgttgaaggctctggttcagaacgtgcattgatgatgcaaacattttatgaacatgctttaaaaggtgaagtgactaaatttaaatatcctgaaattgaaccatcttgtatggcctcattagagacattgcttaacaaaacgattactgttcaagatgtaatgtttttactattatatgcaatcaaagatcttggcggtgtattaaatatgacgcccattactcaagaagaatggcaaagatacgatacgtattttgataaaatgattgaaagaaacaagaaaatgatagaccaaatgcaatag

SEQ ID NO: 21 - DNA, 2917 bp, Staphylococcus aureus
attgcagtaccgtttaacgcaggtaaaatcaaagttttaatagaagccttagagagcgggaactattcgtctattaaaagcgatgtttacgatggtatgttatatgatgcgcctgaccatcttaagtctttggtgaaccgttttgtagaattaaataatattacagagccgctagcagtaacgatccaaacgaatttaccaccatcacgtggattaggatcgagtgcagctgtcgcggttgcttttgttcgtgcaagttatgattttttagggaaatcattaacgaaagaagaactcattgaaaaggctaattgggcagagcaaattgcacatggtaaaccaagtggtattgatacgcaaacgattgtatcaggcaaaccagtttggttccaaaaaggtcatgctgaaacattgaaaacgttaagtttagacggctatatggttgttattgatactggtgtgaaaggttcaacaagacaagcggtagaagatgttcataaactttgtgaggatcctcagtacatgtcacatgtaaaacatatcggtaagttagttttacgtgcgagtgatgtgattgaacatcataactttgaagccctagcggatatttttaatgaatgtcatgcggatttaaaggcgttgacagttagtcatgataaaatagaacaattaatgaaaattggtaaagaaaatggtgcgattgctggaaaacttactggtgctggtcgtggtggaagtatgttattgcttgccaaagatttaccaacagcgaaaaatattgtgaaagctgtagaaaaagctggtgcagcacatacatggattgagaatttaggaggttaatgcgttgattaaaagtggcaaagcacgtgcacatacgaatattgcacttataaaatattggggtaaaaaagatgaagcactaatcattccaatgaataatagcatatctgttacattagaaaaattttacactgaaacgaaagtcacttttaacgaccagttaacacaggatcaattttggttgaatggtgaaaaggttagtggcaaagaattagagaaaatttcaaaatatatggatattgtcagaaatagagctggcatcgattggtatgctgaaattgaaagcgacaattttgtaccaacagcagcagggttggcttcatcagcaagcgcatatgcagctttagcagcagcttgtaatcaagcactagacttgcagctgtcagataaggatttatcgagattggcgcgaattggttcgggttctgcgtcgcgtagtatttatggtggatttgcagaatgggaaaaagggtataatgatgagacgtcatatgccgttccacttgaatcgaatcattttgaagatgaccttgccatgatatttgttgtgattaatcaacattctaaaaaggtacctagtcgatatggtatgtcgttgacacgaaacacatcaaggttttatcaatattggttagatcatattgatgaagatttagctgaagcaaaagcagcgattcaagacaaagattttaaacgccttggtgaagtaattgaagaaaatggtttacgtatgcatgccacgaatctgggatcaacaccgccgttcacttatcttgtgcaagaaagttatgatgtcatggcgctcgttcacgaatgccgagaagcgggatatccgtgttattttacgatggatgcgggtcctaatgtgaaaatacttgtagaaaagaaaaacaagcaacagattatagataaattattaacacagtttgataataaccaaattattgatagtgacattattgccacaggaattgaaataattgagtaaggaagagataaaatgattcaggtcaaagcacccggaaaactttatattgctggagaatatgctgtaacagaaccaggatataaatctgtacttattgcgttagatcgttttgtaactgctactattgaagaagcagaccaatataaaggtaccattcattcaaaagcattacatcataacccagttacatttagtagagatgaagatagtattgtcatttcagatccacatgcagcaaaacaattaaattatgtggtcacagctattgaaatatttgaacaatacgcgaaaagttgcgatatagcgatgaagcattttcatctgactattgatagtaatttagatgattcaaatggtcataaatatggattaggttcaagtgcagcagtacttgtgtcagttataaaagtattaaatgaattttatgatatgaagttatctaatttatacatttataaactagcagtgattgcaaatatgaagttacaaagtttaagttcatgcggagatattgctgtgagtgtatatagtggatggttagcgtatagtacttttgatcatgaatgggttaagcatcaaattgaagatactacggttgaagaagttttaatcaaaaactggcctggattgcacatcgaaccattacaagcacctgaaaatatggaagtacttatcggttggactggctcaccggcgtcatcaccacactttgttagcgaagtgaaacgtttgaaatcagatccttcattttacggtgacttcttagaagattcacatcgttgtgttgaaaagcttattcatgcttttaaaacaaataacattaaaggtgtgcaaaagatggtgcgtcagaatcgtacaattattcaacgtatggataaagaagctacagttgatatagaaactgaaaagctaaaatatttgtgtgatattgctgaaaagtatcacggtgcatctaaaacatcaggcgctggtggtggagactgtggtattacaattatcaataaagatgtagataaagaaaaaatttatgatgaatggacaaaacatggtattaaaccattaaaatttaatatttatcatgggcaataa

SEQ ID NO: 22 - DNA, 2087 bp, Staphylococcus aureus
gtgagtagtaaattggataaaaaagtaagtattcaaacaaagcaagtgttgaaacagcacaacgaaaaagaaaaatttgaatttactactgaaggaacttggcaacaaaggcaatctaactttattcggtatgtagaacaaattgaggatgcaacagttaatgttacaataaaagtggatgatgatagcgttaagttgattcgtaaaggcgacattaatatgaatttgcattttgttgaaggacaaacgacaacaactttttacgatatatcggctggacgaattccactagaagttaaaacattacgcattttacatttcgtaagtggagacggtggcaagctaaagattcattatgaattatatcaagataatgaaaaaatgggttcttatcaatatgaaattaactataaggagataggcgaatgaatattattgatcaagtgaaacaaacattagtagaagaaattgcagcaagtattaacaaagcaggattagcagatgagattcctgatattaaaattgaagttcctaaagatacaaaaaatggagattatgctactaatattgcgatggtactgactaagattgcaaagcgtaatcctcgtgaaattgctcaagcgattgttgataacttagatactgaaaaagcacatgtaaaacaaattgacattgctggtccaggattcattaatttttacttagataatcagtatttaacagcaattattcctgaagcaattgaaaaaggtgatcaatttggacatgtaaatgaatcaaaaggtcaaaatgtattgcttgagtatgtttcagctaaccctacaggagatttacatattggtcatgctagaaatgcagcagttggtgatgctttagctaatattttaactgcagctggctataatgtaacacgtgaatattatattaatgatgctggtaatcaaattactaacttagcgcgttcgattgaaacacatttctttgaagctttaggtgacaatagttattcaatgccagaagatggctataatggaaaagatattattgaaataggtaaagatttagcagagaaacaccctgaaattaaagattattctgaagaagcacgtttgaaagaatttagaaaattaggcgtagaatacgaaatggctaaattgaaaaatgatttagcagagttcaatacgcattttgataattggtttagtgaaacatctttatatgaaaaaggcgaaattcttgaagttttagcaaaaatgaaagaattaggttatacgtatgaagctgatggcgctacatggttacgtacaactgattttaaagacgacaaagacagagtattaattaaaaatgacggtacatatacgtatttcttaccagatattgcgtaccacttcgataaagttaaacgtggtaatgacattttaatcgatttatttggtgctgatcatcatggttatattaatcgtttgaaagcatctcttgaaacgtttggtgtagatagtaatcgtttagaaattcaaatcatgcaaatggttcgtttaatggaaaatggtaaagaagtgaagatgagtaaacgtactggtaatgcgattacattaagagaaattatggacgaagttggcgttgacgctgcacgttatttcttaactatgcgtagtcctgatagtcactttgattttgatatggaattagcgaaagagcaatctcaagacaatccagtttactatgctcaatatgcacatgcgcgtatttgttcaattttaaaacaagcgaaagagcaaggtattgaagtgactgctgcgaatgattttacaacgattacaaatgaaaaagcgattgaattgttgaaaaaagtagctgatttcgaacctacaattgaaagtgctgctgagcatagatcagcacatagaattactaactatattcaagacttggctgctcatttccataaattctataatgctgaaaaagtgttaacagatgatattgaaaaaacaaaagcacatgttgctatgattgaagcggtcagaattacattgaaaaatgcattggcaatggtcggtgtaagcgcacctgaatcaatgtaa

SEQ ID NO: 23 - DNA, 2500 bp, Staphylococcus aureus
ttgttagaaacaaaagatttaaatctgtttttaggtaataagcatgtacttaaaaacatttccttatcgataccagtacgcggcgaaataattggtatcatgggcccgaatggtgctggtaaatcttcccttatcaagtctttaattggtgaatttaatgctaccggtactaaattgttatataacaaacctatacaacaacaactgcaacatattacatatattccacaaaaagcacatattgatttagattttcctataagtgtggaacaagtgattttatcaggttgctacaaagaaattggatggtttagacgacctaataaatcagcaagggataaactcaaacagttattaagcgatttagaattagaatctttacgtcatcgacaaatttcagaattaagtggtggacaattacaacgtgtgctagtagcaagagcattgatgtccgaaagtgaagtttattttctagatgagccgtttgtcggaattgattttagtagcgaaaaattaatcatgacaaaaatcgagaacttaaaacaacaaggaaaacttattcttatcatccaccatgatctatcaaaagcaaagcaatactttgatcgcattattctattaaatcaaacattacgatactttggtgatagtgaagaggctatgagtgtcactcgcttaaacgaaacatttatgagtagcactgactgtagtgaccctagtcaaaggagcaatataacatgttagagtttgtcgaacatttatttacatatcaattcttgaatcgagcattgataacttcaattattgtagggatagtttgtggtacagttggtagtttaattgtattacgtggtctttcattaatgggagatgcaatgagtcacgcagtattacctggtgttgccctatcattcttatttggtattccaatgtttgtaggcgcacttataactggtatgatcgcaagtatttttatcggttatatcacatctagtagtaaaacgaaacctgacgccgctattggaattagttttaccgctttcttagcttcggggattattattattagcttaataaacactacgacagatttgtaccatattctgtttggtaatttactggcaatcacaaatagtgcatttttaacaactattgtgattggttcaatcgtccttattctaatcattattttctatcgtccattaatgatttctacattcgatccaacgtttagtagaatgagtggtctaaatacgacgttattacattactttgtgatgttgttactctcattagtaacagtagcaagtattcaaacggtaggtattattcttgtagttgcattattaattacacctgcatctacagcatttttaattagtaaaaaactatactcaatgatgattatagcaagtttaataagtgtcataagttcaattgtcggactttattacagctatatttacaacattcctagtggtgcgacaatcgtactttgtacgtttgtaatttatatcatcacattatttttcacaaaatttacgaatagaaagaaacgaggaagtttaacatgaaaaaattagtacctttattattagccttattacttctagttgctgcatgtggtactggtggtaaacaaagcagtgataagtcaaatggcaaattaaaagtagtaacgacgaattcaattttatatgatatggctaaaaatgttggtggagacaacgtcgatattcatagtattgtacctgttggtcaagatcctcatgaatatgaagttaaacctaaagatattaaaaagttaactgacgctgacgttattttatacaacggattaaatttagagactggtaacggttggtttgaaaaagccttagaacaggctggtaaatcattaaaagataaaaaagttatcgcagtatcaaaagatgttaaacctatctatttaaacggtgaagaaggcaacaaagataaacaagatccacacgcatggttaagtttagataatggtattaaatacgtaaaaacaattcaacaaacatttatcgataacgacaaaaaacataaagcagattatgaaaagcaaggtaacaaatacattgctcaattggaaaaattaaataatgacagtaaagacaaatttaatgacattccaaaagaacaacgtgccatgattacaagtgaaggtgccttcaagtacttctcaaaacaatacggtattacaccaggttatatttgggaaattaacactgaaaaacaaggtacacctgaacaaatgagacaagctattgagtttgttaaaaagcacaaattaaaacacttattagtagaaacaagtgttgataagaaagcaatggaaagtttatctgaagaaacgaagaaagatatctttggtgaagtgtacacagattcaatcggtaaagaaggcactaaaggtgactcttactacaaaatgatgaaatcaaatattgaaactgtacacggaagcatgaaataa

SEQ ID NO: 24 - DNA, 3643 bp, Staphylococcus aureus
atgataattactgaaaaaagacacgagttaatattagaagaactttcgcacaaagattttttgactttacaagaattaatagatcgaactggttgcagtgcttcaacaatacgaagagatttatctaaactacaacaattagggaaattgcaacgtgtgcatggtggtgcaatgttaaaagaaaatcgtatgattgaggcgaatttaactgaaaaattagcaacgaatcttgatgaaaagaaaatgattgctaaaatagcagctaatcaaatcaacgataatgaatgcttatttatcgatgctggttcatctacattggagctaattaaatatattcaagcgaaagatatcattgtggtaaccaatggtttaacacatgtagaagctttacttaaaaaaggtattaaaacaattatgctaggtggtcaagttaaagaaaatacacttgctacgattggttctagtgctatggagatattaagacgatattgtttcgataaagcttttatcgggatgaatggattagatattgaacttggattaactactcccgatgagcaagaggcattagttaaacaaacagcaatgtcattagccaatcaatcatttgtacttatagatcattctaagtttaataaagtatattttgctcgtgtacctttgctagaaagtacgacaatcatcacatctgaaaaagcattaaatcaagaatcgttaaaagaataccaacaaaagtatcactttataggagggactttatgatttatacagtgactttcaatccttcaattgactatgtcatttttacgaatgattttaaaattgatggtttgaacagagcaacagcaacatataaattcgctggggggaaaggtattaatgtctcgcgcgtcttaaagacattagatgttgagtcaactgccttgggatttgcaggtggatttcctgggaaattcattatagatacattaaataacagtgcaattcaatcgaattttattgaagttgatgaagatacacgtattaatgtgaaattaaaaacaggacaagaaacagaaatcaatgcaccgggtcctcatataacgtcaacacaatttgaacaactgttacaacaaattaaaaatacaacaagcgaagatatagttattgttgctggaagtgtaccaagtagtattccaagcgatgcgtatgcgcaaattgcacaaattacagcacagacaggtgctaaattagtagtcgacgctgaaaaagaattggctgaaagcgttttaccatttcatccactatttattaaacctaataaagatgaattagaagtgatgtttaatacaacagtgaactcagacacagatgttattaaatatggtcgtttgttagttgataaaggtgcgcaatctgttattgtctcgcttggcggtgatggtgctatttatattgataaagaaatcagtattaaagcagttaatccacaagggaaagtggttaatacagttggctctggtgatagtacagttgcaggcatggtggctggaattgcttcaggtttaacgattgaaaaagcattccaacaagcagtcgcatgcggtactgccacggcatttgatgaggacttagcaacacgggacgctatagaaaaaataaaatcacaagttacgattagcgtacttgatggggagtgaaaataatgagagtaacagagttattaacaaaagatacgatagcaatggatttaatggcaaatgacaaaaatggtgttattgatgagttagtaaatcaattagacaaagcaggtaaattaagtgatgtcgcgtcatttaaggaagcgattcacaatcgagaatcacaaagtacaactggtatcggcgaaggtattgctattccacatgcgaaagtagccgcagttaagtctccagctatcgcattcggtaaatctaaagaaggtgtagattaccaaagtttagatatgcaaccagctcatttattctttatgattgcagcgccagaaggtggcgcccaaacacatctagatgctttagctaagttgtctggtattttaatggatgaaaatgtacgcgagaaattattacatgcttcatcacctgaagaagtactagcgattatagatgaggctgatgatgaagtgacaaaagaagaagaggcagaagctgaagcacaacaagttgcaactgcagaacaatcatctaaacaatctaacgagccatatgtgttagcagtaactgcttgtccaacaggtattgcacatacgtacatggcacgtgacgcattgaaaaaacaagcggataagatgggtattaaaattaaagtagaaacgaacggttcaagcggcattaaaaaccatttaactgaacaagatattgaaaatgcaacaggtatcattgttgctgctgatgttcatgttgagacggatcgcttcgatggtaaaaatgtcgtagaagtaccagtagcagatggtattaaacgcccagaagaattaattaataaagcattagatacaagtcgtaaaccttttgttgcccgtgatggtcaaagaaaaggtaactcaaatgacagtcaagaaaaattaagcccaggtaaagcattctataaacacttaatgaacggtgtttctaacatgttgccacttgtaatatctggtggtattttaatggcaattgtatttttatttggagcaaattcatttaatccaaaaagctcagagtacaatgcgtttgcagagcagctttggaacattggtagtaaaagtgcattcgcgctaatcattccaattttatctggattcattgcacgtagtattgcggataaacctggtttcgcttcaggtcttgtaggtggtatgttagcaatttcaggtggttcaggatttattggtggtattattgcaggtttcttagcaggttacttaacacaaggtgttaaagccatgacacgtaagttaccacaagcattagagggattaaagccaacattaatttatccactattaacagtgacagctacaggcttattgatgatttatgtctttaatccaccagcatcttggttaaatcatttgttattagatggattaaacaatttatcaggttctaatattgtattattaggtttagttattggcgctatgatggcgattgatatgggcggtccattcaacaaagcggcatatgtttttgcaacaggtgcgttgattgaaggtaatgcagcaccaattacagctgcaatgattggtggtatgattccaccgttagcaattgcgacagcgatgttaattttcagacgtaaatttacaaaagaacaacgtggttcaattatccctaactatgtgatgggtatgtcctttattacagaaggtgcgattccatttgcagctgccgatccattacgtgttattccttcaatgatgattggttcaggtataggtggcgcaattgctttaggcttaggttctcgaattactgcgccacatggtggtattattgtaattgttggtactgatggtgcacacttacttcaaactcttattgcacttctagttggtacattagtttcagcattaatttatggacttattaaaccaaagttaactgaaacagaaatcgaagcttcaaaatcaatggacgagtag

SEQ ID NO: 25 - DNA, 3556 bp, Staphylococcus aureus
atgaaaataatatatttttcatttactggaaatgtccgtcgttttattaagagaacagaacttgaaaatacgcttgagattacagcagaaaattgtatggaaccagttcatgaaccgtttattatcgttactggcactattggatttggagaagtaccagaacccgttcaatcttttttagaagttaatcatcaatacatcagaggtgtggcagctagcggtaatcgaaattggggactaaatttcgcaaaagcgggtcgcacgatatcagaagagtataatgtccctttattaatgaagtttgagttacatggaaaaaacaaagacgttattgaatttaagaacaaggtgggtaattttaatgaaaaccatggaagagaaaaagtacaatcatattgaattaaataatgaggtcactaaacgaagagaagatggattctttagtttagaaaaagaccaagaagctttagtagcttatttagaagaagtaaaagacaaaacaatcttcttcgatactgaaatcgagcgtttacgttatttagtagacaacgatttttatttcaatgtgtttgatatttatagtgaagcggatctaattgaaatcactgattatgcaaaatcaatctcgtttaattttgcaagttatatgtcagctagtaaatttttcaaagattacgctttgaaaacaaatgataaaagtcaatacttagaagactataatcaacacgttgccattgttgctttatacctagcaaatggtaataaagcacaagctaaacaatttatttctgctatggttgaacaaagatatcaaccagcgacaccaacatttttaaacgcaggccgtgcgcgtcgtggtgagctagtgtcatgtttcttattagaagtggatgacagcttaaattcaattaactttattgattcaactgcaaaacaattaagtaaaattgggggcggcgttgcaattaacttatctaaattgcgtgcacgtggtgaagcaattaaaggaattaaaggcgtagcgaaaggcgttttacctattgctaagtcacttgaaggtggctttagctatgcagatcaacttggtcaacgccctggtgctggtgctgtgtacttaaatatcttccattatgatgtagaagaatttttagatactaaaaaagtaaatgcggatgaagatttacgtttatctacaatatcaactggtttaattgttccatctaaattcttcgatttagctaaagaaggtaaggacttttatatgtttgcacctcatacagttaaagaagaatatggtgtgacattagacgatatcgatttagaaaaatattatgatgacatggttgcaaacccaaatgttgagaaaaagaaaaagaatgcgcgtgaaatgttgaatttaattgcgcaaacacaattacaatcaggttatccatatttaatgtttaaagataatgctaacagagtgcatccgaattcaaacattggacaaattaaaatgagtaacttatgtacggaaattttccaactacaagaaacttcaattattaatgactatggtattgaagacgaaattaaacgtgatatttcttgtaacttgggctcattaaatattgttaatgtaatggaaagcggaaaattcagagattcagttcactctggtatggacgcattaactgttgtgagtgatgtagcaaatattcaaaatgcaccaggagttagaaaagctaacagtgaattacattcagttggtcttggtgtgatgaatttacacggttacctagcaaaaaataaaattggttatgagtcagaagaagcaaaagattttgcaaatatcttctttatgatgatgaatttctactcaatcgaacgttcaatggaaatcgctaaagagcgtggtatcaaatatcaagactttgaaaagtctgattatgctaatggcaaatatttcgagttctatacaactcaagaatttgaacctcaattcgaaaaagtacgtgaattattcgatggtatggctattcctacttctgaggattggaagaaactacaacaagatgttgaacaatatggtttatatcatgcatatagattagcaattgctccaacacaaagtatttcttatgttcaaaatgcaacaagttctgtaatgccaatcgttgaccaaattgaacgtcgtacttatggtaatgcggaaacattttaccctatgccattcttatcaccacaaacaatgtggtactacaaatcagcattcaatactgatcagatgaaattaatcgatttaattgcgacaattcaaacgcatattgaccaaggtatctcaacgatcctttatgttaattctgaaatttctacacgtgagttagcaagattatatgtatatgcgcactataaaggattaaaatcactttactatactagaaataaattattaagtgtagaagaatgtacaagttgttctatctaacaattaaatgttgaaaatgacaaacagctaatcatctggtctgaattagcagatgattagactgctatgtctgtatttgtcaattattgagtaacattacaggaggaaattatattcatgatagctgttaattggaacacacaagaagatatgacgaatatgttttggagacaaaatatatctcaaatgtgggttgaaacagaatttaaagtatcaaaagacattgcaagttggaagactttatctgaagctgaacaagacacatttaaaaaagcattagctggtttaacaggcttagatacacatcaagcagatgatggcatgcctttagttatgctacatacgactgacttaaggaaaaaagcagtttattcatttatggcgatgatggagcaaatacacgcgaaaagctattcacatattttcacaacactattaccatctagtgaaacaaactacctattagatgaatgggttttagaggaaccccatttaaaatataaatctgataaaattgttgctaattatcacaaactttggggtaaagaagcttcgatatacgaccaatatatggccagagttacgagtgtatttttagaaacattcttattcttctcaggtttctattatccactatatcttgctggtcaagggaaaatgacgacatcaggtgaaatcattcgtaaaattcttttagatgaatctattcatggtgtatttaccggtttagatgcacagcatttacgaaatgaactatctgaaagtgagaaacaaaaagcagatcaagaaatgtataaattgctaaatgacttgtatttaaatgaagagtcatacacaaaaatgttatacgatgatcttggaatcactgaagatgtgctaaactatgttaaatataatggaaacaaagcactttcaaacttaggctttgaaccttattttgaggaacgtgaatttaacccaatcattgagaatgccttagatacaacaactaaaaaccatgacttcttctcagtaaaaggtgatggttatgtattagcattaaacgtagaagcattacaagatgatgactttgtatttgacaacaaataa

SEQ ID NO: 26 - DNA, 1256 bp, Staphylococcus aureus
gtgataaataaagacatctatcaagctttacaacaacttatcccaaatgaaaaaattaaagttgatgaacctttaaaacgatacacttatactaaaacaggtggtaatgccgacttttatattacccctactaaaaatgaagaagtacaagcagttgttaaatatgcctatcaaaatgagattcctgttacatatttaggaaatggctcaaatattattatccgtgaaggtggtattcgcggcattgtaattagtttattatcactagatcatatcgatgtatctgatgatgcgataatagccggtagcggcgctgcaattattgatgtctcacgtgttgctcgtgattacgcacttactggccttgaatttgcatgtggtattccaggttcaattggtggtgcagtgtatatgaatgctggcgcttatggtggcgaagttaaagattgtatagactatgcgctttgcgtaaacgaacaaggctcgttaattaaacttacaacaaaagaattagagttagattatcgtaatagcattattcaaaaagaacacttagttgtattagaagctgcatttactttagctcctggtaaaatgactgaaatacaagctaaaatggatgatttaacagaacgtagagaatctaaacaacctttagagtatccttcatgtggtagtgtattccaaagaccgcctggtcattttgcaggtaaattgatacaagattctaatttgcaaggtcaccgtattggcggcgttgaagtttcaaccaaacacgctggttttatggtaaatgtagacaatggaactgctacagattatgaaaaccttattcattatgtacaaaagaccgtcaaagaaaaatttggcattgaattaaatcgtgaagttcgcattattggtgaacatccaaaggaatcgtaagttaaggagctttgtctatgcctaaagtttatggttcattaatcgatactgaaacacgctgtcgccattattttaccgaagaagatattattgctattaaatttaaatgttgtaataaatactatccatgctataagtgccataatgagtttgaaaagcacgccattaagcgttggtctgagccttcatttaacgaaaaagcaatcttatgcggtgtatgcaaacacgaattaacaatcaatgaatatatgatggtagagcgttgtccaaattgccaatctcggtttaacaatcgctgtaaatatcactatcatatttattttgaaatttaa

SEQ ID NO: 27 - DNA, 4720 bp, Staphylococcus aureus
atgttaacgacagaaaaactagttgaaacattaaagttagatttaatcgctggtgaagaaggactatcgaagccaattaaaaatgctgatatatcaagaccaggcttagagatggcaggttatttttcacattatgcgtcagatagaatacaactattaggaacaacggaactatcgttttacaatttattaccagataaggatcgcgcaggtcgtatgcgtaaactatgcagaccagaaacgcctgcaattattgtgacacgtggattgcagccaccagaagaattagttgaagctgcaaaagaattaaataccccacttatagttgctaaagatgcgactacaagtttaatgagtcgcttaacaacgtttttagagcatgcacttgcaaagacgacatctttacatggtgttttagtagatgtttacggtgttggtgtactaattaccggtgattcaggaataggtaaaagtgagactgcgttggaattagttaaacgtgggcatagattagtagcagatgataatgtagaaatacgtcaaattaataaagatgaactaatagggaaaccaccaaagttaatagaacatctattagaaatacgtggactaggtattatcaatgttatgactttatttggcgcgggttcaatattaactgaaaaacgaattagattaaatattaatttggaaaactggaacaagcaaaagttatatgaccgcgtaggtcttaatgaagagacgctaagtattttagatactgaaatcactaaaaaaacaatacctgtaagacctggtagaaatgttgcggtaattattgaggtcgctgcaatgaactatcgattaaatatcatgggcattaacactgccgaagaatttagtgaaagattaaatgaagaaattatcaagaacagtcataagagtgaggagtaggttgaatgggtattgtatttaactatatagatcctgtggcatttaacttaggaccactgagtgtacgatggtatggaattatcattgctgtcggaatattacttggttactttgttgcacaacgtgcactagttaaagcaggattacataaagatactttagtagatattattttttatagtgcactatttggatttatcgcggcacgaatctattttgtgattttccaatggccatattacgcggaaaatccaagtgaaattattaaaatatggcatggtggaatagcaatacatggtggtttaataggtggctttattgctggtgttattgtatgtaaagtgaaaaatttaaacccatttcaaattggtgatatcgttgcgccaagtataattttagcgcaaggaattggacgctggggtaactttatgaatcacgaggcacatggtggaccggtgtcacgcgcttttttagaacaattacatttgcctaattttataatagaaaatatgtatattaacggccaatattatcatccaacattcttatatgaatccatttgggatgtcgctggatttattatcttagttaatattcgtaaacatttaaaattaggagaaacattctttttatatttaacttggtattcaattggtcgattctttatagaaggattacgtacagatagcttaatgctcacaagtaatattagagttgcacaattagtatcaattcttttaattttaataagtataagtttaattgtatatagaaggattaagtataatccaccgttgtatagcaaagttggggcgcttccatggccaacaaaaaaagtgaagtagtgatattttgagaaaatttttatcaaaaacacatcatcatacaaaccctttatggcgtgtataccgtcttgttaaattttcgaaagtttttaagaatgtaattatcattgaattttcgaaatttattccaagtatggtactgaaaagacatatatataaacaacttttaaatattaatatcggtaatcaatcatcgatagcttataaagtaatgttagatattttttacccagaactgattacgattggtagtaacagtgttattggttacaatgtaacaattttgacgcatgaagcattagttgatgaatttcgttatggaccagtgacgataggatctaacactttgattggtgcaaatgctaccattttacccggtataacgattggtgacaatgtaaaagttgcagctggtacggttgtttcaaaagatataccggataatggatttgcatatggcaaccctatgtatataaaaatgattaggaggtgacaattttatggcgcaaaagaataataatgtaattccaatgacttttgatgatgcattttatcgtaaaatggctaaacagaagtttaaacaaagagaatataaacgagctgctgaatactttgaaaaagtgttagaattgtcacctgatgatctggaaattcaaattgattatgcacaatgtctagtgcaacttggtattgctaaaaaagcagaacatttattttatgacaatattatttataataggcatctagaagatagcttttatgaattgagtcagctcaacattgaagttaacgaaccaaacaaggcattcttgtttggtattaattatgttattgttagcgacgaccaagattatagagatgaattagatcaaatgtttgatgtgaaatatcaaagcgaagaacaaattgaacttgaagctcaattgtttgtagttcaaatactattccaatatcttttttctcaaggtcgattaaaagatgcaaagaattatgtcttacatcaaccacaagaagttcaagatcatcgtgtcgtacgtaatttattggcaatgtgttatttatatctcggtgaatatgatacggctaaagcattgtacgaagcactattacaagaggatagtacagatatatatgcattatgccattatactttgctactttataacactaaggaaaatgaacaatatcaaaaatatttaaaaatattaaacaaagttgtacctatgaatgacgatgaaagttttaaattaggtattgtattaagttatttaaagcagtatcgtgcatcacaacaattgttgtaccctttatataaaaaagggaaatttttatcaattcaaatgtacaatgctttagcatataattattattatttaggtgaagaagacgaaagtcattactactgggataaattgaagcaaatttctaaagtggaaattggacatgcgccttgggtaattgaaaatagcaaagaagtttttgaccaacatattttgccattacttcaaagtgatgacagtcattatcgtttatatggtatttttttattggatcaattaaatggtaaagaaattgtgatgacggaaagtatttggcaggttctggaaaatctaaataattatgagaaattgtatttaacgtatttagttcaaggtttaacgctcaataaattagacttcattcatcgcggcttgttaacgctttaccaaaatgaattatttgtaagtgaaaatgatttaatggttgcatggattaatcaaggtgaactcataattgctgaaaaagtagatttaactgatgttgagccatatatcggtgcgtttatttatttgtattttaaaaatcaacctcgaaacgttacaaagaagcaaattacaacatggttaggcataacacaatataaactgaacaaaatgattgaatttctcttgagcatatagatttatgaaaagttagatttattatataatgcgcataatgattaataatgaggaggcgttaataaaatgactgaaatagattttgatatagcaattatcggtgcaggtccagctggtatgactgctgcagtatacgcatcacgtgctaatttaaaaacagttatgattgaaagaggtattccaggcggtcaaatggctaatacagaagaagtagagaacttccctggtttcgaaatgattacaggtccagatttatctacaaaaatgtttgaacacgctaaaaagtttggtgcagtttatcaatatggagatattaaatctgtagaagataaaggcgaatataaagtgattaactttggtaataaagaattaacagcgaaagcggtcattattgctacaggtgcagaatacaagaaaattggtgttccgggtgaacaagaacttggtggacgcggtgtaagttattgtgcagtatgtgatggtgcattctttaaaaataaacgcctattcgttatcggtggtggtgactcagcagtagaagagggaacattcttaactaaatttgctgacaaagtaacaatcgttcaccgtcgtgatgagttacgtgcacagcgtattttacaagatagagcattcaaaaatgataaaatcgactttatttggagtcatactttgaaatcaattaatgaaaaagacggcaaagtgggttctgtgacattaacgtctacaaaagatggttcagaagaaacacacgaggctgatggtgtattcatctatattggtatgaaaccattaacagcgccatttaaagacttaggtattacgaatgatgttggttatattgtgacaaaagatgatatgacaacatcagtaccaggtatttttgcagcaggagatgttcgtgacaaaggtttacgccaaattgtcactgctactggcgatggtagtattgcagcgcaaagtgcagcggaatatattgaacatttaaacgatcaagcttaa

SEQ ID NO: 28 - DNA, 7242 bp, Staphylococcus aureus
gtgaaagacttattgcaagcacagcaaaagcttataccggatctcatagataaaatgtataaacgtttttctattcttactactatctcaaaaaatcagcctgtcggacgtcgaagtttaagcgaacatatggatatgactgaacgtgtactgcgttctgaaacagatatgcttaagaaacaagatttgataaaagttaagcctaccggaatggaaattacagctgaaggtgagcaactgatttcgcaattgaaaggttactttgatatctatgcagatgataatcgtctgtcagaaggtattaagaataaatttcaaattaaggaagttcatgttgttcctggtgatgctgataatagtcaatctgttaaaacagaattaggtagacaagcaggtcaattacttgaaggcatattacaagaagacgcgatagttgctgtaactggcggatccacgatggcatgtgttagtgaagcaattcatttattaccatataatgtattcttcgtaccagccagaggtggactaggcgaaaatgttgtctttcaggcaaacacaattgcagccagtatggcacaacaagctggcggttattatacgacgatgtatgtacctgataatgtcagtgaaacaacatataacacattgttgttagagccatcagtcataaacactttagacaaaattaaacaagcaaacgttatattacacggcattggtgatgcgctgaagatggcgcatcgacgtcaatcacctgaaaaggtcattgaacaacttcaacatcatcaagctgtcggagaggcatttggttattattttgatacacaaggtcaaattgtccataaggttaaaacaattggacttcaattagaagaccttgaatcaaaagactttatttttgcagttgcaggaggcaaatcgaaaggtgaagcaattaaagcatacttgacgattgcacccaagaatacagtgttaatcactgatgaagccgcagcaaagataatacttgaataagagataaaaagtttaatactttttaaatatcattttaaaggaggccattataatggcagtaaaagtagcaattaatggttttggtagaattggtcgtttagcattcagaagaattcaagaagtagaaggtcttgaagttgtagcagtaaacgacttaacagatgacgacatgttagcgcatttattaaaatatgacactatgcaaggtcgtttcacaggtgaagtagaggtagttgatggtggtttccgcgtaaatggtaaagaagttaaatcattcagtgaaccagatgcaagcaaattaccttggaaagacttaaatatcgatgtagtgttagaatgtactggtttctacactgataaagataaagcacaagctcatattgaagcaggcgctaaaaaagtattaatctcagcaccagctactggtgacttaaaaacaatcgtattcaacactaaccaccaagagttagacggttctgaaacagttgtttcaggtgcttcatgtactacaaactcattagcaccagttgctaaagttttaaacgatgactttggtttagttgaaggtttaatgactacaattcacgcttacacaggtgatcaaaatacacaagacgcacctcacagaaaaggtgacaaacgtcgtgctcgtgcagcggcagaaaacatcatccctaactcaacaggtgctgctaaagctatcggtaaagttattcctgaaatcgatggtaaattagatggtggtgcacaacgtgttcctgtagctacaggttcattaactgaattaacagtagtattagaaaaacaagacgtaacagttgaacaagttaacgaagctatgaaaaatgcttcaaacgaatcattcggttacactgaagacgaaatcgtttcttcagacgttgtaggtatgacttacggttcattattcgacgctacacaaactcgtgtaatgtcagttggcgaccgtcaattagttaaagttgcagcttggtatgataacgaaatgtcatatactgcacaattagttcgtacattagcatacttagctgaactttctaaataattttagtatagtttttattcaaatacgctagtgctcagaactatttagcattaattaaagcttatgagtaagcggggagcacaaacgcttctccgcttattttatataaaatttcctaattacaaggaggaaacaccatggctaaaaaaattgtttctgatttagatcttaaaggtaaaacagtcctagtacgtgctgattttaacgtacctttaaaagacggtgaaattactaatgacaaccgtatcgttcaagctttacctacaattcaatacatcatcgaacaaggtggtaaaatcgtactattttcacatttaggtaaagtgaaagaagaaagtgataaagcaaaattaactttacgtccagttgctgaagacttatctaagaaattagataaagaagttgttttcgtaccagaaacacgcggcgaaaaacttgaagctgctattaaagaccttaaagaaggcgacgtattattagttgaaaatacacgttatgaagatttagacggtaaaaaagaatctaaaaatgatccagaattaggtaaatactgggcatctttaggtgatgtgtttgtaaatgatgcttttggtactgcgcatcgtgagcatgcatctaatgttggtatttctacacatttagaaactgcagctggattcttaatggataaagaaattaagtttattggtggcgtagttaacgatccacataaaccagttgttgctattttaggtggagcaaaagtatctgacaaaattaatgtcatcaaaaacttagttaacatagctgataaaattatcatcggcggaggtatggcttatactttcttaaaagcgcaaggtaaagaaattggtatttcattattagaagaagataaaatcgacttcgcaaaagatttattagaaaaacatggtgataaaattgtattaccagtagacactaaagttgctaaagaattttctaatgatgccaaaatcactgtagtaccatctgattcaattccagcagaccaagaaggtatggatattggaccaaacactgtaaaattatttgcagatgaattagaaggtgcgcacactgttgtatggaatggacctatgggtgtattcgagttcagtaactttgcacaaggtacaattggtgtatgtaaagcaattgcaaaccttaaagatgcaattacgattatcggtggcggtgattcagctgcagcagcaatctctttaggttttgaaaatgacttcactcatatttcaactggtggcggcgcgtcattagagtacctagaaggtaaagaattgcctggtatcaaagcaatcaataataaataataaagtgatagtttaaagtgatgtggcatgtttgtttaacattgttacgggaaaacagtcacaagatgacatcgtgtttcatcacttttcaaaaatatttacaaaacaaggagtgtctttaatgagaacaccaattatagctggtaactggaaaatgaacaaaacagtacaagaagcaaaagacttcgtcaatgcattaccaacattaccagattcaaaagaagtagaatcagtaatttgtgcaccagcaattcaattagatgcattaactactgcagttaaagaaggaaaagcacaaggtttagaaatcggtgctcaaaatacgtatttcgaagataatggtgcgttcacaggtgaaacgtctccagttgcattagcagatttaggcgttaaatacgttgttatcggtcattctgaacgtcgtgaattattccacgaaacagatgaagaaattaacaaaaaagcgcacgctattttcaaacatggaatgactccaattatttgtgttggtgaaacagacgaagagcgtgaaagtggtaaagctaacgatgttgtaggtgagcaagttaagaaagctgttgcaggtttatctgaagatcaacttaaatcagttgtaattgcttatgagccaatctgggcaatcggaactggtaaatcatcaacatctgaagatgcaaatgaaatgtgtgcatttgtacgtcaaactattgctgacttatcaagcaaagaagtatcagaagcaactcgtattcaatatggtggtagtgttaaacctaacaacattaaagaatacatggcacaaactgatattgatggggcattagtaggtggcgcatcacttaaagttgaagatttcgtacaattgttagaaggtgcaaaataatcatggctaagaaaccaactgcgttaattattttagatggttttgcgaaccgcgaaagcgaacatggtaatgcggtaaaattagcaaacaagcctaattttgatcgttattacaacaaatatccaacgactcaaatcgaagcgagtggcttagatgttggactacctgaaggacaaatgggtaactcagaagttggtcatatgaatatcggtgcaggacgtatcgtttatcaaagtttaactcgaatcaataaatcaattgaagacggtgatttctttgaaaatgatgttttaaataatgcaattgcacacgtgaattcacatgattcagcgttacacatctttggtttattgtctgacggtggtgtgcacagtcattacaaacatttatttgctttgttagaacttgctaaaaaacaaggtgttgaaaaagtttacgtacacgcatttttagatggtcgtgacgtagatcaaaaatccgctttgaaatacatcgaagagactgaagctaaattcaatgaattaggcattggtcaatttgcatctgtgtctggtcgttattatgcaatggaccgtgacaaacgttgggaacgtgaagaaaaagcttacaatgctattcgtaattttgatgccccaacttatgcaactgccaaagaaggtgtagaagcaagctataatgagggcttaactgacgaattcgtagtaccattcatcgttgagaatcaaaatgacggtgttaatgatggagatacagtgatcttctataatttccgacctgatagagcagcacaattatcggaaatttttgcgaacagagcattcgaaggctttaaagttgaacaagttaaagacttattctatgcaacattcactaagtataacgacaatatcgatgcggctatcgttttcgaaaaagttgatttaaataatacaattggtgaaattgcacaaaataacaatttaacacaattacgtattgcagaaactgaaaaatatcctcacgttacttactttatgagtggtggacgtaacgaggaatttaaaggtgaacgccgtcgtttaattgattcacctaaagttgcaacgtatgacttgaaaccagaaatgagtgcttatgaagttaaagatgcattattagaagagttaaataaaggtgacttggacttaattattttaaactttgctaaccctgatatggttggacatagtggtatgcttgagccgacaatcaaagcaatcgaagcggttgatgaatgtttaggtgaagtcgttgataagattttagacatggacggttatgcaattattactgctgaccatggtaactctgatcaagtattgacggatgatgatcaaccaatgactacgcatacaacgaacccagtaccagtgattgtaacaaaagaaggcgttacacttcgagaaactggtcgcttaggtgacttagcacctacattattagatttattaaatgtagaacaacctgaagacatgacaggtgaatctttaattaaacactaatattgtaaaagatgttaagtaaacgcttaatgacacttattttttgaaaataatagtaatatcattttgttaaatgaaagaataaagctataataattatagaataactatttaaaggagattataaacatgccaattattacagatgtttacgctcgcgaagtcttagactctcgtggtaacccaactgttgaagtagaagtattaactgaaagtggcgcatttggtcgtgcattagtaccatcaggtgcttcaactggtgaacacgaagctgttgaattacgtgatggagacaaatcacgttatttaggtaaaggtgttactaaagcagttgaaaacgttaatgaaatcatcgcaccagaaattattgaaggtgaattttcagtattagatcaagtatctattgataaaatgatgatcgcattagacggtactccaaacaaaggtaaattaggtgcaaatgctattttaggtgtatctatcgcagtagcacgtgcagcagctgacttattaggtcaaccactttacaaatatttaggtggatttaatggtaagcagttaccagtaccaatgatgaacatcgttaatggtggttctcactcagatgctccaattgcattccaagaattcatgattttacctgtaggtgctacaacgttcaaagaatcattacgttggggtactgaaattttccacaacttaaaatcaattttaagcaaacgtggtttagaaactgcagtaggtgacgaaggtggtttcgctcctaaatttgaaggtactgaagatgctgttgaaacaattatccaagcaatcgaagcagctggttacaaaccaggtgaagaagtattcttaggatttgactgtgcatcatcagaattctatgaaaatggtgtatatgactacagtaagttcgaaggcgaacacggtgcaaaacgtacagctgcagaacaagttgactacttagaacaattagtagacaaatatcctatcattacaattgaagacggtatggacgaaaacgactgggatggttggaaacaacttacagaacgtatcggtgaccgtgtacaattagtaggtgacgatttattcgtaacaaacactgaaattttagcaaaaggtattgaaaacggaattggtaactcaatcttaattaaagttaaccaaatcggtacattaactgaaacatttgatgcaatcgaaatggctcaaaaagctggttacacagcagtagtttctcaccgttcaggtgaaacagaagatacaacaattgctgatattgctgttgctacaaacgctggtcaaattaaaactggttcattatcacgtactgaccgtattgctaaatacaatcaattattacgtatcgaagatgaattatttgaaactgctaaatatgacggtatcaaatcattctataacttagataaataa

SEQ ID NO: 29 - DNA, 2122 bp, Staphylococcus aureus
gtgatcattgccataattatattgatatttatttcgtttttcttttcaggaagcgagacggcattaacggctgccaataaaacaaaatttaaaactgaagctgacaaaggtgataaaaaagcaaaaggcattgtaaagttacttgaaaaaccaagtgagtttattacaacgattctaattgggaataatgtcgcgaatattttattaccaacacttgttacaattatggctttacgttgggggattagcgttggtattgcatcagctgttttaacagttgttatcattttgatttccgaagtgattcccaagtctgtcgctgcaacatttccagataaaataacaaggcttgtatatccaattattaatatttgtgtcattgtgtttcgccctatcacattacttttaaataagttgacggacagtattaatcgaagtttatctaagggtcaacctcaagaacatcaattttcaaaagaagaatttaaaacaatgttagcaattgctggacatgaaggtgctttaaatgaaattgagacgagtaggttggaaggtgtcattaattttgaaaatttaaaagtaaaagatgtagatacaacacctagaattaatgtgacggcatttgcttcaaatgcgacatacgaagaagtttatgaaacggttatgaataagccatacactagatatccagtgtacgagggagatattgataacattattggggtgtttcattctaaatatctgttggcttggagtaataaaaaagaagatcaaattacaaactattcagctaagccattatttgtgaatgaacacaataaagctgaatgggtattacgtaagatgactatttctagaaaacatttagcaattgtgttggacgaatttggtggtaccgaagcgatagtgtcacatgaagacttaattgaagaattattaggtatggaaattgaagatgagatggataaaaaggaaaaagaaaaactttctcaacagcaaattcaatttcaacaacggaaaaatcgcaacgtatctatataaggagcgaacagctatgtggaataagaatcgacttactcaaatgttaagtattgaatatccaattatacaagcaggtatggcaggaagtacgacaccgaaattagttgcatcagtaagtaacagtggtgggttaggcacaataggcgcaggttactttaatacgcagcaattggaagatgaaatagattatgtacgccaattaacgtcaaattcttttggcgtaaatgtctttgtaccaagtcaacaatcatataccagtagtcaaattgaaaatatgaatgcatggttaaaaccttatcgacgcgcattacatttagaagagccggttgtaaaaattatcgaagaacaacaatttaagtgtcatattgatacgataattaaaaagcaagtgcctgtatgttgttttacttttggaattcaaaatgaatctattatagaaagattgaaagaagcaaacattaagctaataggtacagcaacaagtgttgatgaagctattgcgaatgaaaaagcgggtatggatgctatcgttgctcaaggtagtgaagcaggtggacatcgtggttcatttttaaaacctaaaaatcaattacctatggttggaacaatatctttagtgccacaaattgtagatgtcgtttcaattccggtcattgccgctggtggaattatggacggtagaggagttttggcaagtattgtcttaggtgcagaaggggtacaaatgggcactgcatttttaacatcacaagatagtaatgcatcagaactactacgagacgcaattataaatagtaaagaaacagatacagtcgttacaaaagcgtttagtggaaagcttgcacgcggtatcaacaataggtttatcgaagaaatgtcccaatacgaaggcgatatcccagattatccaatacaaaatgagctaacaagtagcataagaaaagccgcagcaaacatcggcgacaaagagttaacacatatgtggagtggacaaagcccgcgactagcaacaacgcatcccgccaacaccatcatgtccaatataatcaatcaaattaatcaaatcatgcaatataaataa

SEQ ID NO: 30 - DNA, 10054 bp, Staphylococcus aureus
ttgtcgtttcatcaagtagaagaatggtttgagatatttcgacagtttggttatttacctggatttatattgttatatattagagcgataattccagtatttcctttagcactctatattttaattaacattcaagcttatggacctattttaggtatattgattagttggcttggattaatttctggaacatttacagtctatttgatctgtaaacgattggtgaacactgagaggatgcagcgaattaaacaacgtactgctgttcaacgcttgattagttttattgatcgccaaggattaatcccattgtttattttactttgttttccttttacgccaaatacattaataaattttgtagcgagtctatctcatattagacctaaatattatttcattgttttggcatcatcaaagttagtttcaacaattattttaggttatttaggtaaggaaattactacaattttaacgcatcctttaagagggatattaatgttagttgtgttggttgtattttggattgttggaaaaaagttagaacagcattttatgggatcgaaaaaggagtgacatcgtgaaaaaagttgtaaaatatttgatttcattgatacttgctattatcattgtactgttcgtacaaacttttgtaatagttggtcatgtcattccgaataatgatatgtcaccaacccttaacaaaggggatcgtgttattgtaaataaaattaaagttacatttaatcaattgaataatggtgatatcattacatataggcgtggtaacgagatatatactagtcgaattattgccaaacctggtcaatcaatggcgtttcgtcagggacaattataccgtgatgaccgaccggttgacgcatcttatgccaagaacagaaaaattaaagattttagtttgcgcaattttaaagaattagatggagatattataccgcctaacaattttgttgtgctaaatgatcatgataacaatcagcatgattctagacaatttggtttaattgataaaaaggatattattggtaatataagtttgagatattatcctttttcaaaatggacgattcagttcaaatcttaaaaagaggtgtcaaaattgaaaaaagaattattggaatggattatttcaattgcagtcgcttttgtcattttatttatagtaggtaaatttattgttacaccatatacaattaaaggtgaatcaatggatccaactttgaaagatggcgagcgagtagctgtaaacattattggatataaaacaggtggtttggaaaaaggtaatgtagttgtcttccatgcaaacaaaaatgatgactatgttaaacgtgtcatcggtgttcctggtgataaagtagaatataaaaatgatacattatatgtcaatggtaaaaaacaagatgaaccatatttaaactataatttaaaacataaacaaggtgattacattactgggactttccaagttaaagatttaccgaatgcgaatcctaaatcaaatgtcattccaaaaggtaaatatttagttcttggagataatcgtgaagtaagtaaagatagccgtgcgtttggcctcattgatgaagaccaaattgttggtaaagtttcatttagattctggccatttagtgaatttaaacataatttcaatcctgaaaatactaaaaattaatatgaaacaaatacaacatcgtttgtcggttttaatactgataaacgatgttttattttgttagtaccacaataaaagctaagttcgaaatgaacttataataaatcaatcacaatcactttgtgttaaaatatgtgtcaaaggaagtgagggtttgtcatgacattacatgcttatttaggtagagcgggaacaggtaagtctacgaaaatgttgaccgaaataaaacaaaaaatgaaagcagatccgcttggagatccaatcattttaattgcgccaactcaaagtacatttcaattagaacaagcctttgtcaatgatccggaattaaatggtagtttaagaacagaagtgttgcattttgaacgattaagtcatcgtattttccaagaagttggtagttatagcgaacaaaagttatctaaagctgcaacggaaatgatgatttataacattgttcaagaacaacaaaagtatttaaaactttatcaatcacaagcaaaatattatgggtttagtgaaaaattaacagaacaaattcaagattttaaaaaatatgcagtaacgcctgaacatttagaacactttattgctgataaaaatatgcaaactcgaactaaaaataagttagaggatattgctttaatataccgtgagttcgaacaacgcattcaaaacgagtttattactggtgaggattcattacaatattttattgattgtatgccgaaatcagagtggctaaaacgtgctgatatatatattgatggttttcacaacttttcaacgattgagtatttaataatcaaaggattaattaaatatgcgaagagtgtcacaattatattgacgacagatggtaaccacgatcaatttagtttatttagaaaaccatcggaagtgttacgacatattgaagaaatagcaaatgaactcaatatttctattgaacgtcaatatttcaaccaattatatcgcttcaataatcaagatttaaagcatcttgaacaagaatttgatgtacttcaaatcaatcgagtggcatgtcaaggtcatatcaatattttagaatctgcgactatgagagaggaaataaatgaaattgcgcgacgtatcatcgttgatattcgtgataagcaattacgatatcaagatattgcaattttatatcgtgacgagtcttatgcttatttatttgattccatattaccgctttataatattccttataacattgatacaaagcgttcgatgacacatcatccggtcatggaaatgattcgttcattgattgaagttattcaatctaattggcaagtgaatccaatgctacgcttattgaagactgatgtgttaacggcatcatatctaaaaagtgcatacttagttgatttacttgaaaattttgtacttgaacgtggtatatacggtaaacgttggttagatgatgagctatttaatgtcgaacattttagcaaaatggggcgtaaagcgcataaactgaccgaagatgaacgtaacacatttgaacaagtcgttaagttaaagaaagatgtcattgataaaattttacattttgaaaagcaaatgtcacaagcggaaactgtaaaagactttgcaactgctttttatgaaagtatggaatatttcgaactgccaaatcaattgatgacagagcgagatgaacttgatttaaatggtaatcatgaaaaggcggaggaaattgatcaaatatggaatggcttaattcaaatccttgacgacttagttctagtatttggagatgaaccaatgtcgatggaacgtttcttagaagtatttgatattggtttagaacaattagaatttgtcatgattccacaaacattagatcaagttagtattggtacgatggatttggctaaagtcgacaataagcaacatgtttacttagttggaatgaacgacggcaccatgccacaaccagtaactgcatcaagtttaattactgatgaagaaaagaaatattttgaacaacaagcaaatgtagagttgagtcctacatcagatattttacagatggatgaagcatttgtttgctatgttgctatgactagagctaagggagatgttacattttcttacagtctaatgggatcaagtggtgatgataaggagatcagcccatttttaaatcaaattcaatcattgttcaaccaattggaaattactaacattcctcaataccatgaagttaacccattgtcactaatgcaacatgctaagcaaaccaaaattacattatttgaagcattgcgtgcttggttagatgatgaaattgtggctgatagttggttagatgcttatcaagtaattagagatagcgatcatttaaatcaaggtttagattatttaatgtcagcattaacgtttgacaatgaaactgtaaaattaggtgaaacgttgtctaaagatttatatggtaaggaaatcaatgccagtgtatctcgttttgaaggttatcaacaatgcccatttaaacactatgcttcacatggtctgaaactaaatgaacgaacgaaatatgaacttcaaaactttgatttaggtgatattttccattccgttttaaaatatatatctgaacgtattaatggcgattttaaacaattagacctgaaaaaaataagacaattaacgaatgaagcattggaagaaattttacctaaagttcagtttaatttattaaattcttcagcttactatcgttatttatcaagacgcattggcgctattgtagaaacaacactaagcgcattaaaatatcaaggcacgtattcaaagtttatgccaaaacattttgagacaagttttagaaggaaaccaagaacaaatgacgaattaattgcacaaacattaacgacaactcaaggtattccaattaatattagagggcaaattgaccgtatcgatacgtatacaaagaatgatacaagttttgttaatatcattgactataaatcctctgaaggtagtgcgacacttgatttaacgaaagtatattatggtatgcaaatgcaaatgatgacatacatggatatcgttttacaaaataaacaacgccttggattaacagatattgtgaaaccaggtggattattatacttccatgtacatgaacctagaattaaatttaaatcatggtctgatattgatgaagataaactagaacaagatttaattaaaaagtttaagctgagtggtttagtgaatgcagaccaaactgttattgatgcattggatattcgtttagaacctaaattcacttcagatattgtaccagttggtttgaataaagatggctctttgagtaaacgaggcagccaagtggcagatgaagcaacaatttataaattcattcagcataacaaagagaattttatagaaacagcttcaaatattatggatggacatactgaagttgcaccattaaagtacaaacaaaaattgccatgtgctttttgtagttatcaatcggtatgtcatgtagatggcatgattgatagtaagcgatatcgaactgtagatgaaacaataaatccaattgaagcaattcaaaatattaacattaatgatgaatttgggggtgagtaatagatgacaattccagagaaaccacaaggcgtgatttggactgacgcgcaatggcaaagtatttacgcaactggacaagatgtacttgttgcagccgcggcaggttcaggtaaaacagctgtactagttgagcgtattatccaaaagattttacgtgatggcattgatgtcgatcgacttttagtcgtaacgtttacaaacttaagcgcacgtgaaatgaagcatcgtgtagaccaacgtattcaagaggcatcgattgctgatcctgcaaatgcacacttgaaaaaccaacgcatcaaaattcatcaagcacaaatatctacacttcatagtttttgcttgaaattaattcaacagcattatgatgtattaaatattgacccgaactttagaacaagcagtgaagctgaaaatattttattattagaacaaacgatagatgaggtcatagaacaacattacgatatccttgatcctgcttttattgaattaacagaacaattgtcttcagatagaagtgatgatcagtttcgaatgattattaaacaattgtatttctttagcgttgcaaatccaaatcctacaaattggttggatcaattggtgacaccatacgaagaagaagcacaacaagcgcaacttattcaactactaacagacttatctaaagtatttatcacagctgcctatgatgctttaaataaggcgtatgatttgtttagtatgatggatggcgtcgataaacatttagctgttatagaagatgaacgacgtttaatggggcgtgttttagaaggtggttttattgatataccttatttaactgatcacgaatttggcgcgcgtttgcctaatgtaacagcgaaaattaaagaagcaaatgaaatgatggtcgatgccttagaagatgctaaacttcagtataaaaaatataaatcattaattgataaagtgaaaaatgattacttttcaagagaagctgatgatttgaaagctgatatgcaacaattggcgccacgagtaaagtaccttgcgcgtattgtgaaagatgttatgtcagaattcaatcgaaaaaagcgtagcaaaaatattctggatttttctgattatgaacattttgcattacaaattttaactaatgaggatggttcgccttcagaaattgccgaatcataccgtcaacactttcaagaaatattggtcgatgagtatcaagatacgaaccgggttcaagagaaaatactatcttgcatcaaaacgggtgatgaacataatggtaatttatttatggttggagatgttaagcaatccatttataaatttagacaagctgatccaagtttatttattgaaaagtatcaacgctttactatagatggagatggcactggacgtcgaattgatttgtcgcaaaacttccgttctcgaaaagaagtactgtcaacgactaactatatattcaaacatatgatggatgaacaagtcggtgaagtaaaatatgatgaagcggcacagttgtattatggtgcaccatatgatgaatcggaccatccagtaaacttaaaagtgcttgttgaagcggatcaagaacatagtgatttaactggtagtgaacaagaagcgcattttatagtagaacaagttaaagatatcttagaacatcaaaaagtttatgatatgaaaacaggaagctatagaagtgcgacatacaaagatatcgttattctagaacgcagctttggacaagctcgcaatttacaacaagcctttaaaaatgaagatattccattccatgtgaatagtcgtgaaggttactttgaacaaacagaagtccgcttagtattatcatttttaagagcgatagataatccattacaagatatttatttagttgggttaatgcgctccgttatatatcagttcaaagaagacgaattagctcaaattagaatattgagtccaaatgatgactacttctatcaatcgattgtaaattacattaatgacgaagcagcagatgctattttagttgataaattaaaaatgtttttatcagatattcaaagttaccaacaatatagtaaagatcatccggtgtatcagttaattgataaattttataatgatcattatgttattcaatactttagtggacttattggtggacgtggacgacgtgcaaacctttatggtttatttaataaagctatcgagtttgagaattcaagttttagaggtttatatcaatttattcgttttatcgatgaattgattgaaagaggcaaagattttggtgaggaaaatgtagttggtccaaacgataatgttgttagaatgatgacaattcatagtagtaaaggtctagagtttccatttgtcatttattctggattgtcaaaagattttaataaacgtgatttgaaacaaccagttattttaaatcagcaatttggtctcggaatggattattttgatgtggataaagaaatggcatttccatctttagcttcggttgcatataaagctgttgccgaaaaagaacttgtgtcagaagaaatgcgattagtctatgtagcattaacaagagcgaaagaacaactttatttaattggtagagtgaaaaatgataaatcgttactagaactagagcaattgtctatttctggtgagcacattgctgtcaatgaacgattaacttcaccaaatccgttccatcttatttatagtattttatctaaacatcaatctgcgtcaattccagatgatttaaaatttgaaaaagatatagcacaagttgaagatagtagtcgtccgaatgtaaatatttcaattatatactttgaagatgtgtctacagaaaccattttagataataatgaatatcgttcggttaatcaattagaaactatgcaaaatggtaatgaggatgttaaagcacaaattaaacaccaacttgattatcaatatccatatgtaaatgatactaaaaagccatcaaaacaatctgtttctgaattgaaaaggcaatatgaaacagaagaaagtggcacaagttacgaacgagtaagacaatatcgtatcggtttttcaacgtatgaacgacctaaatttctaagtgaacaaggtaaacgaaaagcgaatgaaattggtacgttaatgcatacagtgatgcaacatttaccattcaaaaaagaacgcatatctgaagttgagttacatcagtatatcgatggattaatcgataaacatattatcgaagcagatgcgaaaaaagatatccgtatggatgaaataatgacatttatcaatagtgagttatattcgattattgctgaagcagagcaagtttatcgtgaattaccgtttgtagttaaccaagcattagttgaccaattgccacaaggagacgaagacgtctcaattattcaaggtatgattgacttaatctttgttaaagatggtgtgcattattttgtagactataaaaccgatgcatttaatcgtcgccgtgggatgacagatgaagaaattggtacacaattaaaaaataaatataagatacagatgaaatattatcaaaatacgcttcaaacgatacttaataaagaagttaaaggttatttatacttcttcaaatttggtacattgcaactgtagtattttgattttcaaaagaataaaaaataatttcgattaagtgcaaagtccttgtagcagaatgaacacaactcattttcaaaattgtcttacttatttatttgttatttgataacgaaaaaagttataatgtgaattaagataaagatgaggagttgagaatgaatgaaattcttatcattcaagtataatgacaaaacttcatatggcgttaaagtaaaacgcgaagatgctgtatgggatttaacacaagtatttgctgactttgcagaaggagatttccatcctaaaacattgttagctggtttacaacaaaatcatactttagattttcaagaacaagtacgtaaagcagttgtagcagcagaagatagcggcaaagctgaagactataaaatttcatttaatgacattgaattcttaccaccagtaacacctccgaataatgtgattgcttttggtagaaattacaaagatcatgcgaacgaattaaatcatgaagtagaaaaattatatgtatttacaaaagcagcgtcatctttaacaggagataatgcaacaattccaaatcataaagatattactgatcaattagattatgaaggtgaattaggtattgttattggtaagtctggtgaaaagattccaaaagcattagctttagattatgtttacggctatacaattattaacgatatcactgatcgcaaagcacaaagtgaacaagatcaagcatttttatcaaaaagtttaactggcggttgcccaatgggtccttatatcgttactaaagacgaactaccattacctgaaaatgtaaatattgttacaaaagttaacaatgaaattagacaagatggtaacactggcgaaatgattcttaaaattgatgaattaatagaagaaatttcaaaatatgttgcactacatccgggagatattattgcaactggtacaccagcaggcgttggtgcaggtatgcaaccacctaaatttttacaaccaggtgatgaagttaaagtgactattgataatattggaacgctgacaacttatatcgctaaataa

SEQ ID NO: 31 - DNA, 1696 bp, Staphylococcus aureus
ttgtcgtttcatcaagtagaagaatggtttgagatatttcgacagtttggttatttacctggatttatattgttatatattagagcgataattccagtatttcctttagcactctatattttaattaacattcaagcttatggacctattttaggtatattgattagttggcttggattaatttctggaacatttacagtctatttgatctgtaaacgattggtgaacactgagaggatgcagcgaattaaacaacgtactgctgttcaacgcttgattagttttattgatcgccaaggattaatcccattgtttattttactttgttttccttttacgccaaatacattaataaattttgtagcgagtctatctcatattagacctaaatattatttcattgttttggcatcatcaaagttagtttcaacaattattttaggttatttaggtaaggaaattactacaattttaacgcatcctttaagagggatattaatgttagttgtgttggttgtattttggattgttggaaaaaagttagaacagcattttatgggatcgaaaaaggagtgacatcgtgaaaaaagttgtaaaatatttgatttcattgatacttgctattatcattgtactgttcgtacaaacttttgtaatagttggtcatgtcattccgaataatgatatgtcaccaacccttaacaaaggggatcgtgttattgtaaataaaattaaagttacatttaatcaattgaataatggtgatatcattacatataggcgtggtaacgagatatatactagtcgaattattgccaaacctggtcaatcaatggcgtttcgtcagggacaattataccgtgatgaccgaccggttgacgcatcttatgccaagaacagaaaaattaaagattttagtttgcgcaattttaaagaattagatggagatattataccgcctaacaattttgttgtgctaaatgatcatgataacaatcagcatgattctagacaatttggtttaattgataaaaaggatattattggtaatataagtttgagatattatcctttttcaaaatggacgattcagttcaaatcttaaaaagaggtgtcaaaattgaaaaaagaattattggaatggattatttcaattgcagtcgcttttgtcattttatttatagtaggtaaatttattgttacaccatatacaattaaaggtgaatcaatggatccaactttgaaagatggcgagcgagtagctgtaaacattattggatataaaacaggtggtttggaaaaaggtaatgtagttgtcttccatgcaaacaaaaatgatgactatgttaaacgtgtcatcggtgttcctggtgataaagtagaatataaaaatgatacattatatgtcaatggtaaaaaacaagatgaaccatatttaaactataatttaaaacataaacaaggtgattacattactgggactttccaagttaaagatttaccgaatgcgaatcctaaatcaaatgtcattccaaaaggtaaatatttagttcttggagataatcgtgaagtaagtaaagatagccgtgcgtttggcctcattgatgaagaccaaattgttggtaaagtttcatttagattctggccatttagtgaatttaaacataatttcaatcctgaaaatactaaaaattaa

SEQ ID NO: 32 - DNA, 2198 bp, Staphylococcus aureus
atgaacgtgggtattaaaggttttggtgcatatgcaccagaaaagattattgacaatgcctattttgagcaatttttagatacatctgatgaatggatttctaagatgactggaattaaagaaagacattgggcagatgacgatcaagatacttcagatttagcatatgaagcaagtgtaaaagcaatcgctgacgctggtattcagcctgaagatatagatatgataattgttgccacagcaactggagatatgccatttccaactgtcgcaaatatgttgcaagaacgtttagggacgggcaaagttgcctctatggatcaacttgcagcatgttctggatttatgtattcaatgattacagctaaacaatatgttcaatctggagattatcataatattttagttgtcggtgcagataaattatctaaaataacagatttaactgaccgttctactgcagttctatttggagatggtgcaggtgcggttatcatcggtgaagtttcagaaggcagaggtattataagttatgaaatgggttctgatggcactggtggtaaacatttatatttagataaagatactggtaaactgaaaatgaatggtcgagaagtatttaaatttgctgttagaattatgggtgatgcatcaacacgtgtagttgaaaaagcgaatttaacatcagatgatatagatttatttattcctcatcaagctaatattagaattatggaatcagctagagaacgcttaggtatttcaaaagacaaaatgagtgtttctgtaaataaatatggaaatacttcagctgcgtcaatacctttaagtatcgatcaagaattaaaaaatggtaaactcaaagatgatgatacaattgttcttgtcggattcggtggcggcctaacttggggcgcaatgacaataaaatggggaaaataggaggataacgaatgagtcaaaataaaagagtagttattacaggtatgggagccctttctccaatcggtaatgatgtcaaaacaacatgggagaatgctctaaaaggcgtaaatggtatcgataaaattacacgtatcgatactgaaccttatagcgttcacttagcaggagaacttaaaaactttaatattgaagatcatatcgacaaaaaagaagcgcgtcgtatggatagatttactcaatatgcaattgtagcagctagagaggctgttaaagatgcgcaattagatatcaatgataatactgcagatcgaatcggtgtatggattggttctggtatcggtggtatggaaacatttgaaattgcacataaacaattaatggataaaggcccaagacgtgtgagtccatttttcgtaccaatgttaattcctgatatggcaactgggcaagtatcaattgacttaggtgcaaaaggaccaaatggtgcaacagttacagcatgtgcaacaggtacaaactcaatcggagaagcatttaaaattgtgcaacgcggtgatgcagatgcaatgattactggtggtacggaagctccaatcactcatatggcaattgcaggtttcagtgcaagtcgagcgctttctacaaatgatgacattgaaacagcatgtcgtccattccaagaaggtagagacggttttgttatgggtgaaggtgctggtattttagtaatcgaatctttagaatcagcacaagctcgaggtgccaatatttatgctgagatagttggctatggtactacaggtgatgcttatcatattacagcgccagctccagaaggtgaaggcggttctagagcaatgcaagcagctatggatgatgctggtattgaacctaaagatgtacaatacttaaatgcccatggtacaagtactcctgttggtgacttaaatgaagttaaagctattaaaaatacatttggtgaagcagctaaacacttaaaagttagctcaacaaaatcaatgactggtcacttacttggtgcaacaggtggaattgaagcaatcttctcagcgctttcaattaaagactctaaagtcgcaccgacaatacatgcggtaacaccagacccagaatgtgatttggatattgttccaaatgaagcgcaagaccttgatattacttatgcaatgagtaatagcttaggattcggtggacataacgcagtattagtattcaagaaatttgaagcataa

SEQ ID NO: 33 - DNA, 5700 bp, Staphylococcus aureus
atggggaaatatattttcaaacgatttatttatatgcttatttctttatttattattattacaattacatttttcttaatgaaattaatgccaggttcgccatttaacgatgctaaattaaatgctgaacaaaaagaaattttaaatgaaaaatatggattaaatgatcctgtagctacgcagtatttacattatttaaaaaatgttgttacaggcgattttggtaattcattccagtatcataatcaacctgtgtgggatttgattaaaccgagactactaccttcttttgaaatgggtcttacagcaatgttcatcggtgtgatactgggacttattttaggtgttgcagcagctactaaacaaaattcttgggttgactatacaactacagttatttcagttattgctgtatctgtaccatcttttgtacttgctgtacttttacaatatgtatttgcagttaaattaagatggttcccagtagctggatgggaaggtttttcgaccgcggtattaccgtcacttgcattatctgcagctgttttagcaactgtcgccagatacataagagcagagatgatagaggtattaagttcagactatattttattagcgagagctaaaggtaattcgacaatgcgtgtactttttggacatgcacttagaaatgctttaattccaattattacaattatcgttcccatgttagcaagtattttaacaggcactttaacaattgaaaatatttttggggttcctggattaggggatcaattcgtacgttcaattacaacaaatgatttctcagtaatcatggcaatcacactattatttagcacactgtttatcgtttctatttttattgtagatattttgtacggtgtgatagatccacgaattcgtgttcaaggaggtaaaaaataatggctgaaaataaaaacaatttgtcgattaacgacgatcattctaatgcagctatgacgcatacctctgacgctatcgcatcatctgattttattattagagaattagacttgaatcaggaacctgaaatgcaacgagaaagcaaaaacttttggcaagatgcttgggctcagttaaaacgaaataagttagctgttgtcggtatgataggtttaattatcattgtaatatttgcttttatcggtccagttataaataaacatgattatgctgaacaaaatgtagaacatagaaatcttccggcaaaaatacctgtattagacaaagttccatttttaccttttgatggtaaagatgcagatggcaaggatgcttataaagcagcaaatgctaaagaaaattattggtttggtactgatcagttgggtcgagatttatggacaagaacatggaaaggtgctcaaatttcattgtttatcggtgttgttgcagcgatgttagatatttttattggcgttgtatatggtgcgatttctggattcttcggtggacgtgtcgatacgattatgcaacgtatacttgaagtcatagcatctattccgaatttaattgtcgtaattttatttgtattaatttttgaaccatccatttggacaattatattggctatgtctatcacaggctggttaggcatgagcagagttgtacgtggagaatttttaaaattgaaaaatcaagagtttgtcatggcttcgaaaacattgggggcttcaaaattcaaattgatatttaagcatattttacctaatacgttaggtgctatcgtggttacatcaatgtttacagtacctagtgctattttcttcgaagcatttttaagtttcattggtataggtgtacctgcacctcaaacatcgttagggtcattagtaaatgatgggcgcgcaatgttattaatttatccacatgaattatttataccagcaatgattttaagtttattaattctattcttttacttatttagtgatggattacgtgatgcatttgatccgaaaatgcgtaaataaaagggggcatagcatatgactgaaagaatattagaagtaaatgatttgcatgtttcctttgatattacagcaggggaagtgcaggcagtgagaggtgtagatttttatttaaacaagggggaaacattggcaattgttggtgaatcaggttcaggtaaatctgtaacaacaaaagcaattacaaaattattccaaggggacacaggaagaattaaaaagggagaaattttatttttaggggaagatttagcaaaaaaacctgaaaatgagttaattaaattacgtggcaaagatatttcaatgatctttcaagatccaatgacatctttaaacccaacgatgcaaattggtaaacaagtcatggaaccattaattaagcacaaaaattatagtaaagcacaagctaaaaagcgcgcattggaaatactaaatcttgtaggtttaccaaatgcagaaaaaagatttaaagcatatcctcatcaattttcaggtggacaaaggcaaagaattgttattgcaaccgcattagcttgtgaacctaaagtgctcattgctgatgaaccaacgactgcattagacgtaacgatgcaggcacaaattttagatttaatgaaagaactacaacaaaaaatcgatacagcaattatttttataacgcatgatttaggggttgttgcgaatattgctgatagagtggcagttatgtatggtggtcaaatggttgaaacaggagatgttaacgaaatattttatgatccaaagcatccatatacatggggattattatcgtcaatgcctgatttatcaacaacaaatgacacaccattactagcgattcctggagcgccacctgatttattacacccacctaaaggtgatgcatttgcgagacgtagtcaatatgcattagatattgattttaaagtagaaccaccgtggtttaaagtttcaccgacacattttgtgaaatcttggttattagacgcacgtgcaccaaaagttgaactacccgagctggtaaaacaacgtatgaaaccgatgcctaataattatgaaaaaccactcaaggtagaaagggtgtcgttcaatgaaaaatgatgaagtgctattatctattaaaaatttaaagcaatattttaacgcaggaaagaaaaacgaagtgagagcgattgaaaatatttcgtttgatatatacaaaggggaaacattaggtttagtaggagaatcggggtgtggtaaatctacaactggtaaatcaattattaaacttaatgatattacaagtggagaaattttgtatgagggtattgatatacaaaagattcgtaaacgtaaagatttgcttaaatttaataaaaagatacagatgatttttcaagacccatatgcgtctttaaatcctaggttaaaagtaatggatatagtagctgaaggtattgatatccatcatttagcaactgataagcgtgaccgaaaaaaacgtgtctatgatttacttgaaactgttggattaagtaaagaacatgccaatcgctatcctcatgaattttcaggtggacaacgccaacgtattggaattgcccgtgcattagccgttgaaccagaattcattatcgcggacgaaccaatatcggcattggatgtttcaatccaagctcaagtagttaatttattattaaaattacaacgtgaaagagggattacgttcctatttatagctcatgatctatcaatggtgaagtatatttcagatcgtattgcagtcatgcattttgggaaaatagttgaaattggaccggcagaagaaatttatcaaaatccattacacgattatactaagtctttattatcagccattccacaacctgatcctgaatcagaacgcagtcgcaaacgatttagttatattgatgatgaagcaaataatcatttaagacaattacatgaaattagaccgaatcactttgtctttagtactgaagaagaagcggcacaactacgagaaaataaattggtgacacaaaattaaggggaagggggaaatgcaatgacgagaaaatttagaacacttattttaattttgattgctacaattgcattaagtggttgtgctaatgacgatggtatttattcagataaaggtcaagtattcagaaaaattttgtcatcagacttaacatcccttgatacatcattaataacggatgaaatatcttctgaagtgactgcgcaaacattcgaaggtttatacacattaggaaaaggtgacaaaccggtgttaggtgttgcgaaagcttttcctgaaaagagtaaagatggtaaaactttaaaggttaaattaagaagcgatgctaaatggagcaatggtgacaaagtgactgcacaagactttgtttatgcttggagaaaaacagttgaccctaaaacaggttctgaatttgcatacattatgggggacattaaaaatgcgagtgatattagtactggtaagaaacctgtagagcaattaggtatcaaagcattaaatgatgaaacattacaaattgaattagaaaagccggttccatatattaatcaattattagcacttaatacctttgcacctcaaaatgaaaaagttgccaaaaaatatggtaaaaattacggtacggcagctgatagagcggtatacaatggtccatttaaagttgatgattggaaacaagaagataaaaccttactatctaaaaatcagtattattgggataaaaagaatgtaaaattagataaagtgaattataaagttattaaagacttacaagccggtgcatcattgtatgatactgaatcagtagatgacgcagttattactgcagatcaagtaaataaatataaagacaacaaaggattaaactttgtgttaacgtctgggacattttttgtaaaaatgaatgaaaaacaatatcctgattttaaaaacaaaaatttaagattggctatcgcacaagcaatagataaaaaaggatacgttgattcagtgaaaaacaatggctcaattccttccgatacactaacagccaaaggaattgcgaaagcgcctaatggcaaagattatgcgagtaccatgaattcgcctttaaaatataatcctaaagaagcaagagcacactgggacaaagctaaaaaagagttaggtaaaaatgaagtgacattttcaatgaacacagaagatacaccagatgcaaaaatatctgctgaatatatcaaatcgcaagttgagaaaaatttaccaggagttactttgaaaattaagcaattaccgtttaaacaaagagtatcactagaactgagtaacaattttgaagcatcacttagtggttggtctgcagattaccctgatcctatggcttatttagaaacaatgaccacaggtagcgcacaaaataatacagactggggtaataaagaatatgatcaattacttaaagtagcaagaaccaaattggcacttcaaccgaacgaacgatatgaaaacttgaaaaaagcagaagaaatgttcctaggagatgcaccggtagcaccaatttatcaaaaaggtgttgcacatttaacaaatcctcaagtaaaaggattaatttaccataaatttggtccaaataactcacttaaacatgtatatattgataaatcgatagataaagaaacaggtaagaagaaaaaataa

SEQ ID NO: 34 - DNA, 6985 bp, Staphylococcus aureus
atgcgtttatatattaatgaaattaaaattaaagatgacatactttattgttatacagaagattctattaaaggattatctgaagtaggacaaatgctcgttgatagtgataattatgcctttgcgtatacattagatgatggtaaagcgtatgcttatctcattttcgtacaagaaacatggacgatgttgcatgaaaacacgactaaaaaaattattatcaatgatgaactagaattgactgaattccaccaagaacttacttatattttagacaacataaaagggaataataattatggtaaggaatttgttgcaaccgttgaagaaacattcgacattgaataaagcggggtgaagcactatgaatcaatgggatcagttcttaacaccttataagcaagcggttgatgagttgaaagtgaaacttaaaggcatgcgcaaacaatatgaagttggtgaacaagcgtcgccaatagaatttgttactggtcgtgttaaaccgatcgctagtattatagataaggcaaacaaacgacaaataccatttgataggttaagagaagaaatgtacgatatcgctggtttaagaatgatgtgccaatttgtagaagatattgatgttgtcgtcaatattttaagacaaagaaaagattttaaagtaattgaagaacgagattatattcgtaacactaaagaaagtggttaccgctcgtatcatgtcattattgaatatccaattgaaacattacaaggccaaaaatttatattggctgagattcagattcgtacattagcaatgaatttctgggcaacgattgaacatactttacgatataaatatgatggtgcttatccggatgaaattcaacatcgtttggaaagagcggcagaagcagcgtatttacttgatgaagagatgtctgaaattaaaaatgaaattcaggaagctcaaaaatattacacgcaaaaacgttctaaaaaacatgaaaatgattaacgaggtgttataaatcatgcgttatacaattttaactaaaggtgactccaagtctaatgccttaaagcataaaatgatgaactatatgaaagattttcgcatgattgaggatagtgaaaatcctgaaattgttatttcagttggtggtgatggtacattactacaagcattccatcagtatagccacatgttatcaaaagtggcatttgttggagttcatacaggtcatttaggattttatgcggattggttacctcatgaagttgaaaaattaatcatcgaaattaataattcagagtttcaggtcattgaatatccattgcttgaaattattatgagatacaacgacaacggctatgaaacaaggtatttagcattaaatgaagcaacgatgaaaactgaaaatggctcaacacttgttgtggatgttaacttaagagggaaacactttgagcgatttagaggcgatggattatgtgtatcaacaccttcgggttcaacggcttataacaaagcgctaggtggcgcactgatacatccttcacttgaagcaatgcaaattacagaaattgcctcaataaataatcgtgtgtttagaacggtaggatcaccacttgtattaccaaagcatcatacatgtttaatatcaccagttaatcatgataccattagaatgacgatagatcatgttagtatcaaacataaaaatgttaattcaatacaataccgtgtagcaaatgaaaaagtgaggtttgcacgttttagaccattcccgttctggaaacgtgtacacgattctttcatatcaagtgatgaagaacgatgaaatttaagtatcatatatcacaacaagaaactgttaaagcttttttagcacgacatgatttttctaagaagacagtgagcgccattaaaaataatggcgctttaattgttaatgatgaaccagtcacagtacgtaagcaattaatgccaaatgatatattagaaattcatttaccgcgagaaataccgagtgttaatttaataccttatgctcgtaagctagaagtattgtatgaagatgcttttatcatcatagttactaaaccaaacaatcaaaattgtacgccttcgagagaacatcctcatgaaagtttaatcgaacaagtactatatcattgtcaggaacatggtgaaaatattaacccacatattgttacgcgtctagatcgtaatacaactggtattgtgatattcgctaaatatggacatatccatcatttattttctaaagtaaacttgaaaaaaatatatacttgccttgtatatggcaaaacccatacatctggtattattgaagctaatattagacggtcaaaggatagtattataactagagaagttgcctcggatggtaaatacgctaaaacatcttatgaagtaataaatcagaatgataaatacagtttatgcaaagttcatttgcatacgggacgtacacatcaaattcgtgtacattttcaacatattgggcatccaattgtgggagattctttgtatgatggttttcatgacaaaattcatggtcaagtactgcaatgtacgcaaatatattttgttcatccaatcaataagaacaatatttatattacaattgattataagcaattacttaaattattcaatcaactctaattcacacagggggtgtaagtatgtcaatgaacacagatgaaaaagagcgtgttcaagaggaattatatgatgagacattattagatcaatacttagaaaatgatgatattgatcaatttagagatgaatttctagcattacacacatatgaacaaagtgagtattttgaagatactaccgatgaaaatagacaaaagatttttcaatatttatcacctgaagaggttgcaaatttctttgatcaattagatattgatgacgatgaatatgagttgctatttgataaaatgaatgcgacatacgcaagtcacatattagaagaaatgtcatacgataatgcagtagatattttaaatgagttgactaaaccaaaagttgctagtcttttaacattgatgaataaagatgacgcgaatgaaatcaaagcattacttcactatgatgaggatacggccggcggtattatgacgacggagtatttatcacttaaagcgcatacgcctgttaaagaagcgttattattggtcaaagcgcaagcgccagacgcagaaacaatatatgttatatttgtcgttgatgatgatggtaaattagtaggtgttttatcactaagagatttaattgtagctgaaaatgatgcttatattgaagatattatgaatgaacgtgtcattagtgtgaatgtagcagacgaccaagaagatgttgctcaagttatgagagactatgatttcatggctgtacctgttatagattaccaagaacatttgcttggtatcatcacgattgatgatattttagacgttatggatgaagaggctagtgaagactactctcgtttagccggggtatcagatatcgattcgactaatgattcaatcattaaaacagcattaaaacgtttaccatggttgattattttaacatttttaggaatgattactgcgacaattttagggagatttgaaaaaacattagaaaatgtagcgctactcgcagcgtttattcctattattagtggtatgtcaggaaattcaggtacacaatctttagccgtttcagttcgtaacattacgacaggggaaattaatgagcaaagtaaatttagaattgcattaagagaagcgggaagtggtgtattatcgggcgttgtatgttcaacaatattatttacaattattgttgcaatatatcatcagccacttttagcattaatcgttgcaggaagtttaacttgtgcgatgacggtggggacgtttgtaggttcgatgattccattattgatgaataaattaaatatcgatccagcagtggctagtggaccatttattacaacaattaatgatattattagtatgttgatttattttggtttagctacatcatttatggcttacttaatttaaggaggagttatggagtttttatctttagttattgttgttttagcagcgtttttaactccaataattgtcaatcgattaaatattaatttcttgccagttgttgttgcagaaattttgatggggattgtgattggaaattcatttctaaatatagtagaaagggattcaattctaaatattttatcaacgttaggctttatctttttaatgtttttaagtggtttagaaattgattttaaagcttttaaaaaagataaacgcgcacgtcaaggacaaaatgatgatgaatcctcaattccagggcatcttaatctagcgttaactgtatttgcatttattatgattatttcgattcttttagcgtatgtatttaaatggcttggattagtggatgatgtgttattaatggtcattatcatttcaactatttccttaggcgtagttgttccaactttaaaagaaatgaatattatgagaacaactatagggcaatttatcctattagtagcagtacttgcggacttagtaactatgattttattaacggtctatggcgcaatcaatggtcaaggcggcagtacaatatggttaataggtatattagttgttttcacagcaatttcatatattttaggtgttcaatttaaaagaatgtcatttttacaaaaattgatggatggtacgacgcaaatcggtattcgtgcggtatttgcattaataatattattagtagccctagcagagggagttggcgcagaaaatatattaggtgcattcttagcaggtgtcgttgtttcattattaaatccagatgaagaaatggttgaaaagttagactcatttggttatgggttctttattcctattttctttataatggttggtgtagatttaaacataccttcattaattaaagaaccgaaattactaattatcataccgattttaatcgttgcatttatcatttcaaaattaattccagtcatgtttattcgacgttggtttgatatgaaaacaacgattgcatcagcatttttattaacatcaacattatcgctcgtgatagctgcagccaaaatttcagaaagattaaatgctatttcagctgaaacgtcaggtatattaattttaagcgcagtcattacatgtgtattcgttccgattattttcaaaaaactgtttccagttccagatgagtttaaccgtaaaattgaagttagtttaattggtaaaaatcaattaacgattcctatagcgcaaaatttaacatctcagttatatgacgtgacattatattatcgcaaagacttgagtgatcgtcgtcaattgtcagatgatatcacgatgatagaaattgctgattatgaacaagatgttttagaacgactaggtctgtttgaccgagacatagttgtttgtgctacgaatgacgatgatattaaccgaaaagttgctaaattagccaaagcacatcaagttgagcgtgtcatttgcagacttgaaagcacaacggacgatacagagttagttgattcaggtattgaaattttcagtagctacttaagtaataaaatcttattaaaaggtttaattgaaacacctaacatgttgaatttattaagtaatgttgaaacgtcactatatgaaattcaaatgttaaattataaatatgaaaatattcaattacgtaatttcccattcggaggagacatcatcttcgtgcgtattatccgtaataatgagtcgattgttccgcatggagatacacaattgcgatatggagatcgcttaattgttaccggtgctaaagaatacgttgatgaattgaagcaagagttagaattttatttttaacaataatgatattaaaatgcagacgtattttagtacgacgtaaaattaatgattttaaaatgctagtatgtatatgattttgataaataaatgctttttacgtaaatcaagtttgatacagaaaggactaaatcaaacatttatcgttgtaatacgtttaaataactttattaaaaagtcataatagtgttaaaatgtattgacgaataaaaagttagttaaaactgggattagatattctatccgttaaattaattattataaggagttatcttacatgttaaatcttgaaaacaaaacatatgtcatcatgggaatcgctaataagcgtagtattgcttttggtgtcgctaaagttttagatcaattaggtgctaaattagtatttacttaccgtaaagaacgtagccgtaaagagcttgaaaaattattagaacaattaaatcaaccagaagcgcacttatatcaaattgatgttcaaagcgatgaagaggttattaatggttttgagcaaattggtaaagatgttggcaatattgatggtgtatatcattcaatcgcatttgctaatatggaagacttacgcggacgcttttctgaaacttcacgtgaaggcttcttgttagctcaagacattagttcttactcattaacaattgtggctcatgaagctaaaaaattaatgccagaaggtggtagcattgttgcaacaacatatttaggtggcgaattcgcagttcaaaattataatgtgatgggtgttgctaaagcgagcttagaagcaaatgttaaatatttagcattagacttaggtcctgataatattcgcgttaatgcaatttcagctggtccaatccgtacattaagtgcaaaaggtgtgggtggtttcaatacaattcttaaagaaatcgaagagcgtgcacctttaaaacgtaacgttgatcaagtagaagtaggtaaaacagcggcttacttattaagtgacttatcaagtggcgttacaggtgaaaatattcatgtagatagcggattccacgcaattaaataa

SEQ ID NO: 35 - DNA, 1944 bp, Staphylococcus aureus
ttggatgcaagtacgttgtttaagaaagtaaaagtaaagcgtgtattgggttctttagaacaacaaatagatgatatcactactgattcacgtacagcgagagaaggtagcatttttgtcgcttcagttggatatactgtagacagtcataagttctgtcaaaatgtagctgatcaagggtgtaagttggtagtggtcaataaagaacaatcattaccagctaacgtaacacaagtggttgtgccggacacattaagagtagctagtattctagcacacacattatatgattatccgagtcatcagttagtgacatttggtgtaacgggtacaaatggtaaaacttctattgcgacgatgattcatttaattcaaagaaagttacaaaaaaatagtgcatatttaggaactaatggtttccaaattaatgaaacaaagacaaaaggtgcaaatacgacaccagaaacagtttctttaactaagaaaattaaagaagcagttgatgcaggcgctgaatctatgacattagaagtatcaagccatggcttagtattaggacgactgcgaggcgttgaatttgacgttgcaatattttcaaatttaacacaagaccatttagattttcatggcacaatggaagcatacggacacgcgaagtctttattgtttagtcaattaggtgaagatttgtcgaaagaaaagtatgtcgtgttaaacaatgacgattcattttctgagtatttaagaacagtgacgccttatgaagtatttagttatggaattgatgaggaagcccaatttatggctaaaaatattcaagaatctttacaaggtgtcagctttgattttgtaacgccttttggaacttacccagtaaaatcgccttatgttggtaagtttaatatttctaatattatggcggcaatgattgcggtgtggagtaaaggtacatctttagaaacgattattaaagctgttgaaaatttagaacctgttgaagggcgattagaagttttagatccttcgttacctattgatttaattatcgattatgcacatacagctgatggtatgaacaaattaatcgatgcagtacagccttttgtaaagcaaaagttgatatttttagttggtatggcaggcgaacgtgatttaactaaaacgcctgaaatggggcgagttgcctgtcgtgcagattatgtcattttcacaccggataatccggcaaatgatgacccgaaaatgttaacggcagaattagccaaaggtgcaacacatcaaaactatattgaatttgatgatcgtgcagaagggataaaacatgcaattgacatagctgagcctggggatactgtcgttttagcatcaaaaggaagagaaccatatcaaatcatgccagggcatattaaggtgccacatcgagatgatttaattggccttgaagcagcttacaaaaagttcggtggtggccctgttgatcaataaaagatttattgatgaaggtaaaactattgatgtttatttattcgaagcattaaataaccagataatcattgctataccagattggttttggtcatatcagatggcaatgacattagatgaagaaacttgttttgaagcaatactcatgcaattgtttgtttttaaagaagaggaagaggcagaatcgattgcatcacaactaacagattggatagaaacatataaaaaggagaaagactaatgaacttaaagcaagaagttgagtctagaaagacttttgcgattatttcacatcccgatgcagggaaaacaacgttaactgaaaaactattgtacttcagtggtgctattcgtgaagcgggtacagttaaagggaagaagactggtaaatttggcgaccaagtgactgggaatgaaagtttgaaccaaagaggcgttggttatttcctgtatacttag

SEQ ID NO: 36 - DNA, 166 bp, Staphylococcus aureus
tccacagtagctcagtggtagagctatcggctgttaaccgatcggtcgtaggttcgagtcctacctgtggagccattggaaacgtactcaagttggctgaagaggcgcccctgctaagggtgtaggtcgcgaaagcggcgcgagggttcgaatccctccgtttccg

SEQ ID NO: 37 - DNA, 1769 bp, Staphylococcus aureus
atgaaaatagcaactctgaacaaaggcaaagaaacaaaatattttaatggatatcctttaattgaagaagaggatatctattcacaagatcatttaaaagaaggagatatttttcaaattgtgactgataaatcacaatatgttgcaacggcttatgttggtcgccaacataaaggattaggttgggttctaacatacgataaagctcaagaaatcaacacagctttctttgtgaaattgtttaatactgcattagcagaacgtgattattattttaatatagatggaacaaatgcttttagattatttaatgctgaaggtgatggtgttgggggattaacaatcgacaattacgatggtcatttgttgattcaatggtactcaaaaggtatttataaatttaaatatgccattcttgaagcggttagaaaagtatttgattataaatctatttacgaaaaagtaagatttaaagacagcgaatatagtggtggttttgttgaaggcgatgcacctgagtttccaattgttatcgaagaaaacttcacattttataatgtagaccttgaagatggtttgatgacaggtatctttttagatcaaaaagaagtgcgcaagaaattaaggggtcaatatgccaaagaacgccatgttttaaacttatttagttatacaggtgctttttctgtaatagcagcaagtgaggcatcttcaacaacaagtgtagatttggctaatcgttctcgtagtttaactgaagaaaattttggattaaatgctattgatcctaaatcccaatatatttatgtcatggacacttttgatttctataaatatgctgcacgacatggacatagttatgacacgatcgtgattgatccacctagctttgcacgcaacaaaaaacgtacattttcagtgcaaaaagattatgacaaattaattaatggcgccttaaatattttatcatctgaaggaacattattgttatgtacaaatgcaagtgtatatccattaaagcaatttaaaaatactattaaaaagacgcttgaagagagtggcgttgattatgaattaactgaagttatgggtttaccaaaagattttaaaacgcatccacattataagccatctaaatatttaaaagctgtttttgtaaatattagacattaatttgataaaaaggggtatagtaacttattgagaaaaagaagggtgataatattatgggattcaaaaacaatttaacatcaaatttaacaaataaaattggtaattcagtctttaaaatagaaaatgttgacggaaaaggtgcaatgccaacgacgattcaagaattgagagaaagacgacaacgtgctgaagcaattgtaaagagaaagtctttaatgtcatcaacaatgagcgttgttccaattccgggtttagattttggtgttgatttaaaattaatgaaagatattatcgaagatgtaaataaaatatacggattagatcataagcaagttaatagccttggggatgatgtgaaagaaagaattatgtctgcagcagcaattcaaggtagtcaatttattggtaaaagaatttcaagtgcatttttaaaaatagttattagagatgtagctaaacgtactgctgcaaaacaaacaaaatggtttcctgttgtaggacaagctgtgtctgcatctattagttactattttatgaataaaattggaaaagatcacattcaaaaatgcgaaaatgttattaaaaatgtcatgtag

SEQ ID NO: 38 - DNA, 1988 bp, Staphylococcus aureus
atggaacaaaattcatatgtaatcatcgacgagactggtattcacgctagaccagcaacaatgttagtacaaacagcttcaaaattcgattctgatattcaattagaatataacggtaagaaagtaaacttaaaatcaatcatgggtgttatgagccttggtgttggtaaagatgctgaaattacaatttatgctgacggtagtgatgaatctgacgccattcaagcaatcagtgacgtcttatcaaaagaaggattgactaaataatcatgtctaaattaattaaaggtattgctgcatctgatggtgtcgcaattgctaaagcttatttattagttgagccagacttaacattcgacaaaaatgaaaaagtcactgatgttgaaggagaagttgcaaagttcaatagcgctatcgaagcttctaaagttgagttaactaaaattagaaataatgcagaggttcaactaggtgctgataaagctgctatctttgatgcacatttattagttttagatgaccctgaattaattcaaccaatccaagataagattaaaaatgaaaacgctaatgctgctacagcattaacggatgtaacaacacaatttgttacaatttttgaatctatggataacgaatacatgaaagaacgtgcggctgatattcgcgacgtttctaaacgtgtgttatcacatattttaggtgtagaattaccgaatccgagtatgattgatgaaagcgttgttattgtagggaatgacttaacgccatctgatactgctcaattaaataaagaattcgtacaaggttttgctacaaacattggcggaagaacaagtcactctgcaattatgagtcgttctttagaaattccagcaattgttggtacaaaatcaattactcaagaagttaaacaaggcgacattattatcgtagatggattaaatggtgatgtaatcgttaatccaactgaagatgagttaatcgcttatcaagataaacgtgagtgttattttgctgacaagaaagaattacaaaaactacgtgatgctgatactgttacagttgatggtgttcacgcagagcttgctgcaaatattggtacacctaatgatttgccaggtgttattgaaaatggtgcacaaggtatcggcttatatagaactgagtttttatatatgggtcgtgaccaaatgcctacagaagaagaacaatttgaagcttataaagaagtattagaagcaatggacggtaaacgtgttgttgtacgtactttagatataggtggagataaagaattatcatacttaaacttgcctgaagaaatgaatccattcttaggttaccgtgcgattcgtttatgccttgcgcaacaagatattttcagaccacagctacgtgcattattacgtgcatcagtttatggtaagttaaatatcatgttcccaatggttgcaacaattaacgaatttagagaagcaaaagctatattattagaagaaaaagaaaaccttaaaaatgaaggtcatgacatttcggatgatatagaattaggaatcatggtagagatacctgcaacagcagcattagctgatgtctttgctaaagaagtagatttcttcagtatcggtacaaatgatttaattcaatacacattagctgctgaccgtatgtcagagcgtgtatcatatctataccaaccatataacccttcaatcttacgtttagttaaacaagttattgaagcgtcacataaagaaggtaaatggacaggtatgtgtggtgaaatggctggagatgaaacagctattccattattgcttggtttaggtttagatgagttctctatgagtgcaacgtctattctgaaagcaagaagacaaattaatggtttaagtaaaaatgaaatgactgaacttgctaaccgtgcagtcgactgtgcaacgcaagaagaagttattgaattagttaacaactacgtaaaataa

SEQ ID NO: 39 - DNA, 1870 bp, Staphylococcus aureus
ttgtgcggtgaaaatacacaatcactttatgttgaagctcaaacagaagaacaagtacgtcgttacttgaaagatcgtaattttaatatcgaatttatcactaaattagagggcgcacatttagattacgaaaaagaaactcagaacactttaatgtggagattgctaaataatgaaacaattacatccaaatgaagtaggtgtatatgcacttggaggtctaggtgaaatcggtaaaaatacttatgcagttgagtataaagacgaaattgtcattatcgatgcaggtatcaaattccctgatgataacttattagggattgattatgttatacctgactacacatatctagttcaaaaccaagataaaattgttggcctatttataacacatggtcacgaagaccatataggcggtgtgcccttcctattaaaacaacttaatatacctatttatggtggtcctttagcattaggtttaatccgtaataaacttgaagaacatcatttattacgtactgctaaactaaatgaaatcaatgaggacagtgtgattaaatctaagcactttacgatttctttctacttaactacgcatagtattcctgaaacttatggcgtcatcgtagatacacctgaaggaaaagtagttcataccggtgactttaaatttgattttacacctgtaggcaaaccagcaaacattgctaaaatggctcaattaggcgaagaaggcgttctatgtttactttcagactcaacaaattcacttgtgcctgattttactttaagcgaacgtgaagttggtcaaaacgtagataagatcttccgtaattgtaaaggtcgtattatatttgctaccttcgcttctaatatttaccgagttcaacaagcagttgaagctgctatcaaaaataaccgtaaaattgttacgttcggtcgttcgatggaaaacaatattaaaatcggtatggaacttggttatattaaagcaccacctgaaacatttattgaacctaataaaattaataccgtaccgaagcatgagttattgatactatgtactggttcacaaggtgaaccaatggcagcattatctagaattgctaatggtactcataagcaaattaaaattatacctgaagataccgttgtatttagttcatcacctatcccaggtaatacaaaaagtattaacagaactattaattccttgtataaagctggtgcagatgttatccatagcaagatttctaacatccatacttcagggcatggttctcaaggtgatcaacaattaatgcttcgattaatcaagccgaaatatttcttacctattcatggtgaataccgtatgttaaaagcacatggtgagactggtgttgaatgcggcgttgaagaagataatgtcttcatctttgatattggagatgtcttagctttaacacacgattcagcacgtaaagctggtcgcattccatctggtaatgtacttgttgatggtagtggtatcggtgatatcggtaatgttgtaataagagaccgtaagctattatctgaagaaggtttagttatcgttgttgttagtattgattttaatacaaataaattactttctggtccagacattatttctcgaggatttgtatatatgagggaatcaggtcaattaatttatgatgcacaacgcaaaatcaaaactgatgttattagtaagttaaatcaaaataaagatattcaatggcatcagattaaatcttctatcattgaaacattacaaccttatttatttgaaaaaacagctagaaaaccaatgattttaccagtcattatgaaggtaaacgaacaaaaagaatcaaacaataaataa

SEQ ID NO: 40 - DNA, 1027 bp, Staphylococcus aureus
atgcgcgtcattgcaggtaaacataaaagtaaagctttagaaagtatggaaggccgtaatacgagaccaactatggataaagttaaagaaggtatctttaatagtttatatgatgtgtcaggtataggtttagatttatttgcaggaagcggggcgcttggaatagaagcactctctcgaggtatggataaggtaatctttgttgatcaaaattttaaagctgtaaaagttattaaatcaaatcttgcgaatttggatttagaggcacaatctgaagtttataaaaataatgcagatagagctttaaaagcattgtcaaaacgtgatattcaatttgatgtcattttcttagatccaccttataataaaggtctcattgataaagctttaaaactaatttcagagtttaatttattgaaagaaaatggtatcatcgtttgtgaatttagcaatcatgaagaaatagactatcaaccgtttaatatgattaaacgttaccattatgggttgacagacacattgttattagaaaagggagaatagcatggaacatacaatagcggtcattccgggtagttttgaccccattacttatggtcatttagacattattgagagaagtacagatagatttgatgaaattcatgtctgtgttcttaaaaatagtaaaaaagaaggtacgtttagtttagaagagcgtatggatttaattgaacaatctgttaaacatttacctaatgtcaaggttcatcaatttagtggtttactagtcgattattgtgaacaagtaggagctaaaacaatcatacgtggtttaagagcagtcagtgattttgaatatgaattacgcttaacttcaatgaataaaaagttgaacaatgaaattgaaacgttatatatgatgtctagtactaattattcatttataagttcaagtattgttaaagaagttgcagcttatcgagcagatatttctgaattcgttccaccttatgttgaaaaggcattgaagaagaaatttaagtaa

SEQ ID NO: 41 - DNA, 3461 bp, Staphylococcus aureus
atgtctgaacaacaaacaatgtcagagttaaaacaacaagcgcttgtagatattaatgaagcaaatgatgaacgtgcactgcaagaagttaaagtgaaatacttaggtaaaaaagggtcagttagcggactaatgaaattgatgaaggatttgccgaatgaagagaaacctgcgtttggtcaaaaagtgaatgaattgcgtcaaacaattcaaaatgaattagatgaaagacaacagatgttagttaaagaaaaattaaataagcaattggctgaagaaacaattgatgtatcattaccaggtcgtcatattgaaatcggttcaaagcatccattaacacgtacaatagaagaaattgaagacttattcttaggtttaggttatgaaattgtgaatggatatgaagttgaacaagatcattataacttcgaaatgctgaatttacctaaatcacaccctgcacgtgatatgcaagatagtttctatattacggatgaaattttattacgtacgcatacatcaccagtgcaggcacgtacgatggaatcacgtcatggtcaaggtccagttaaaattatttgccctggtaaagtgtatcgtcgtgactctgatgatgcgacacatagtcatcaatttacacaaatcgaaggattagttgttgataaaaacgttaaaatgagtgatttgaaaggcactttagaattgttagctaagaaattatttggtgctgatcgtgaaattcgtttacgtccaagttacttcccattcactgaaccttctgtagaagttgatgtgtcatgttttaaatgtaaaggaaaaggttgtaatgtgtgtaaacacacaggatggattgaaattttaggtgctggaatggtacatcctaatgtattagaaatggctggttttgattcttcagagtactctggatttgcatttggtatgggaccagaccgtattgcaatgttgaaatatggtatagaagatattcgtcatttctatactaatgatgtgagatttttagatcaatttaaagcggtagaagatagaggtgacatgtaatgttgatatcaaatgaatggttgaaagaatatgtaacaatcgatgattctgtaagtgatttggcagaacgtattacgcgcacaggtattgaagtggatgatttaattgactacacaaaagatatcaaaaatttagttgtcggtttcgttaagtcaaaagagaaacatcctgatgccgataaattaaatgtttgccaagttgatatcggagaagacgaacctgtacaaatcgtatgtggtgcaccgaacgttgatgcaggacaatatgtcattgttgctaaagtaggtggcagattgcctggtggtattaaaattaagcgtgccaaattacgcggtgaacgttcagaaggtatgatttgttcgttacaagaaattggtatttcaagtaactatataccgaaaagttttgaatcaggcatttatgtttttagtgaatcccaagttccaggaacagatgccttacaagctttatatttagatgatcaagtaatggaatttgatttaacgccgaatcgtgcagatgctttaagtatgataggtactgcttatgaagttgcagcattatataatacaaaaatgactaagccagagacaacatcaaatgagcttgagttatctgcaaatgatgaattgactgtgacaattgaaaatgaagataaagtaccatattatagtgcacgtgttgttcacgacgtgacaattgaaccttcgccaatttggatgcaagcacgcttaataaaagcgggtatacgtcctattaataatgttgttgacatttcaaattatgtgttattagaatacggtcaaccattgcacatgtttgatcaagatgcgattggttcacaacaaattgttgttcgtcaagctaatgaaggcgaaaaaatgacaacattagatgatacagaacgtgaattattaacgagcgatattgtcattactaatggacaaactccaattgcattagctggtgttatgggtggcgatttttcagaagttaaagaacaaacatcaaatatagtgattgaaggtgctatttttgatccagtttcaattcgtcatacatcaagacgtttaaatttacgcagtgaatcatctagtcgttttgaaaaaggaatagctactgaatttgtagatgaagcagtcgaccgtgcatgttatttattacaaacttatgcaaacggaaaagtgctaaaagatagagtgtcttcaggagaacttggtgcatttattacaccaatcgacatcactgctgataaaattaatcgcactattggatttgatttgtcacaaaatgatattgttactatttttaatcaactagggtttgatacagaaataaatgatgatgttattacagtgctagtaccatcacgtcgtaaagatattacaattaaagaagatttaattgaagaagttgcacgtatatatggatacgacgatattccatcaacgttacctgtcttcgataaagttactagtggtcagctaactgatcgccaatataaaactagaatggttaaagaagtgttagaaggtgctggattagatcaagctattacgtattcgttagtttctaaagaggatgctactgcattttcgatgcaacagcgtcaaacaattgatttattgatgccaatgagtgaagcgcatgcgtcattacgtcaaagtttattaccacatttaatcgaagcagcatcatataatgtggcacgcaaaaataaagatgtaaaattatttgaaatcggcaatgtcttctttgctaatggagaaggtgaactaccagatcaagttgaatatttaagtggtattttaactggagattatgtagtcaatcaatggcaaggtaagaaagaaacggttgatttctatttagcaaaaggtgtcgtggatcgagtatctgaaaagttaaaccttgaatttagttatcgtcgtgctgatattgatggattacatccaggtcgtactgctgaaatcttattagagaataaagttgttggttttattggtgaattacatccaacattagcagctgataatgatttaaaacgtacgtatgtttttgagttgaattttgatgcattaatggctgtgtcggtaggttacattaattaccagccaattccgagattcccaggcatgtctcgtgacattgcattagaagtagatcaaaatattccagcagctgatttattatcaacgattcatgcacacggtggcaatatattaaaagatacacttgtctttgatgtatatcagggcgaacatttagaaaaaggtaaaaaatcaattgcaatacgtttaaattatttagacacagaagaaacattgacagatgagcgcgtttcaaaagtgcaagcggaaattgaagcagcattaattgaacaaggtgctgttattagataa

SEQ ID NO: 42 - DNA, 1896 bp, Staphylococcus aureus
atgaataaaccaataggtgtaatagactctggtgtcggaggtttgacagtagctaaagaaattatgcgtcagttgccaaatgagacgatttattacttaggtgatattggacgatgtccatatgggccaagaccaggagaacaagtaaaacaatatacagttgaaatcgctcgtaaattaatggaatttgatataaaaatgctcgtgattgcttgtaatacagcaactgctgtagctttagaatatttacaaaagaccttatcaatcccagtgattggtgtaattgaaccaggtgctagaacagcaataatgactactagaaatcaaaatgtattagtactaggaactgaaggcacaattaaatctgaagcatatcgtacgcatattaaacgtatcaatccacatgtagaggtacatggcgttgcctgtccaggttttgtgccacttgtagaacaaatgagatatagtgatccaacaattacaagcattgtcattcatcaaacactgaaacgttggcgtaatagtgagtctgatactgtcattttaggatgtacccactatccattgctctataaacctatctatgattattttggtggtaaaaagacagtgatttcgtctggattagaaacggctcgtgaagttagtgcattgctaacatttagtaatgaacatgcaagttatactgaacatccagatcatcgattttttgcaacaggtgatcctactcacattactaacattatcaaagagtggttaaatttatctgtcaatgtggaacgtatatcagtgaatgactaggaggatttttaatgaaagagattgttattgcatcgaataatcaagggaaaataaatgactttaaagtaatatttccagattaccacgtaataggtatttcagaactaataccagattttgatgtggaagaaacaggatcaacatttgaagaaaatgctatattaaaatcagaagctgctgcaaaagcattgaataaaactgtcatagctgatgacagtggactagaagtttttgcattaaatggtgagccaggtatatactctgcacgttatgctggtgaaaataaaagcgatgaagcaaatattgaaaaattattaaataagcttggtaatacaactgatcgtcgtgcgcaatttgtttgtgtcataagtatgagtggccctgatatggaaacaaaagtatttaaaggtactgtttcaggtgaaattgcagatggaaaatatggcgaaaatggtttcggatatgatccgatattttatgtaccgaaattagataaaaccatggctcaactttcaaaagaacaaaaagggcaaattagtcatagacgaaatgcgattaatttacttcaagcttttcttgaaggtgaaaaaaatgtctaaatggattattgtgagtgataaccatactgaatcaggcgttttatatcaaatttatgaaatgcacccagatgcagatgtatatttacatttaggagattcagaattcgcgtatgatgatacggaacttagcttatttaatagagtaaaaggcaattgtgatttttacccagaatttgaaaatgaagcggtcgcaaaatataatgacgtgaaagcattttatactcatggacatttatatcaagtcaatcgaacaagagatttattagctgaaaaaggacttgaattaggttgtttgtttgcattttatggacatacacatgtggcaaaatatgagtatattaatggtgttcatgttattaatcctggaagtatatctcaatctagaagttcaatggaagaaacatatgctgaagttattattgatgatcaaactttacatggcaccatcaatttcaaaaatcgacatcacgaaacaatcagtcatactactttttaa

SEQ ID NO: 43 - DNA, 3685 bp, Staphylococcus aureus
atgaaaaatttacgaaacagaagttttttaactttattagacttttcacgacaagaggtagaattcttattaacactctccgaggatttaaaacgtgctaaatatattggcactgaaaagcctatgttaaaaaataaaaatattgcactgttatttgaaaaagattctacaagaacgcgatgtgcatttgaagttgcagcgcatgatcaaggtgcaaatgtaacttatttaggcccaactggatcacaaatgggtaaaaaagaaacaactaaagatactgcacgtgtgcttggtggaatgtatgatggcattgaataccgtggtttttcacaaagaacagtagaaactttagctgaatattcaggcgtaccagtgtggaatggtttaactgatgaagatcatcctactcaagttcttgctgatttcttaacagcaaaagaagtcttaaaaaaagattatgcagatattaactttacatatgttggagatggtcgtaataacgttgcaaatgcattaatgcaaggtgctgccattatgggtatgaacttccatttagtttgtccaaaagaattaaatccaacagatgaattattaaatcgctgtaaaaatattgccgctgaaaatggtggcaacatattaatcacagatgatattgaccaaggtgtaaaaggttcggatgtaatttacactgatgtttgggtatcaatgggtgaacctgatgaagtatggaaagaacgacttgaattattgaaaccatatcaagtaaataaagaaatgatggataaaactggtaatccaaatgttatttttgagcattgcttaccatctttccataatgctgatacgaaaattggtcaacaaatttttgaaaaatatggtattcgagaaatggaagttacagatgaagtattcgaaagtaaagcttcagttgtattccaagaagctgagaacagaatgcatacaatcaaagcagtcatggttgctacattgggtgaattttaaatgatataaggaagtgaatatgatggcgaaaatagtagtagcattaggtggtaatgctttaggaaaatcacctcaagaacaactcgagcttgttaaaaatactgcgaaatcattagtaggattaataacaaaaggacatgagattgttattagtcatggtaatggaccacaggttggaagcattaatttgggacttaactatgctgcagaacataaccaaggtccggcatttccatttgctgaatgtggcgcaatgagtcaagcttacatcggctatcaattacaagaaagcttacaaaatgaattgcattctattggaatggataaacaagtggtaacactagtgacacaagttgaagttgatgaaaatgatccggcatttaacaatccttcaaaaccaattgggttattttacaacaaagaagaagctgaacaaattcaaaaagaaaaaggatttatatttgttgaagatgctggaagaggatatagacgcgttgttccttcaccacaacccatctctattattgaattagagagtattaaaacacttattaaaaatgatacactcgttattgctgctggtggtggaggtataccagtaattagagagcaacatgatggttttaaaggtattgatgcagttatagacaaagataaaacaagtgcgttgttgggtgctaatattcaatgcgatcaattgattattttaacagcaattgattatgtatatattaattttaacactgaaaaccaacagcctttgaaaacaacaaatgttgatgaattaaaacgatatatagacgaaaatcaatttgcaaaaggaagtatgttaccaaaaattgaagcagccatatcatttattgaaaacaatccaaaaggaagtgtgcttataacatcattaaatgaattagatgctgccttagagggtaaagtaggtactgtgattaaaaagtaattgaattgaaacgcttttcaattactatatgtcaaatgcatgatttttattatttatgtgcaccccctgaaaataatgcctctattttgatgcggggtgcactttcttaatttatatttataaaatctttaaggtagaaatgctaggttaaatgtcgaaggagatgaaaccgtggaaaatacaattaatgaaagtgaaaagaaaaaacgatttaaattaaaaatgccaggtgcatttatgattttattcattttaacggttgttgcagttatagcaacatgggttattcctgctggtgcatattctaaactttcttacgaaccttcatcccaagaactaaagatagttaaccctcataaccaagtgaaaaaggttccgggtacgcaacaggaactagacaaaatgggggttaaaattaagattgaacaatttaaatcaggtgcaattaataagccagtatcaattccgaatacttatgaaagattaaagcaacatccagctggaccagaacaaataacaagtagcatggttgaaggtacgatagaagcggtcgatatcatggtattcattcttgtactagggggacttattggcgtagttcaagccagtggttcttttgaatcgggattgttagctttaacgaagaaaacaaaagggcatgaatttatgctaattgtgtttgtatcaatactaatgattatcggcgggacgttatgtggtattgaagaagaagctgtagcattctatccgattttagtccctatatttatagcgttaggatacgattctatcgtttcagttggtgccatattccttgccagctctgtcggtagtacattttcaactattaacccgttctcggttgtaattgcctctaatgccgctggtacaacttttacggatggcttgtattggagaataggtgcttgtattgtcggtgcgatttttgttattagttatttatattggtactgtaaaacaattaaaaacgatcctaaagcgtcatattcttatgaagacaaagatgcttttgaacagcaatggtctgtattaaaagatgacgatagtgcccattttactttgcgtaagaagataatccttacattatttgtactaccatttccaattatggtatggggagttatgacgcaaggttggtggttcccagttatggcttcagcatttttaatatttacaattataataatgtttattgctgggacaggtaaatctggattgggagaaaaaggaactgtagatgcatttgtcaatggtgcatcaagtttagtaggtgtatctttaattattggtttagctcgaggtattaatttagtgttgaatgaaggtatgatttcagatacaatcttacacttttcatcatctttagttcaacatatgagtggaccattatttatcatcgtattactatttattttcttctgtttaggttttatcgtgccatcatcttctggattagcggtattatcaatgcctatctttgcaccactagctgatacagtaggtataccaagattcgtcatcgttacgacatatcaatttggtcaatatgcgatgttattcttagcgccgactggacttgttatggccacactacaaatgttaaacatgcgatattcacattggttccgatttgtatggccggtagttgcttttgtattgattttcggtggcggagtactaattacgcaagtactaatttattcataa

SEQ ID NO: 44 - DNA, 12436 bp, Staphylococcus aureus
atggactgtaaagtagttagtttaaatgaaaaagatcagtttataccaaaaataaagagcagtgaccctgtaataacaggattatttcaatatgatgcagctcaacaaactagttttgaaaaaaggatgtctaaagaaaataatggaagagaagcggcattagcgaatgttattcgtgaatatatgagtgatttaaagctttcaaatgaacaagaattaaacatacaacatttagctaatggttcaaaagttgtgattggtggacaacaagcagggcttttcgggggaccattgtatacattccataaaatattttcaatcattactttatctaaggaattaacggatacacataagcaacaagtagtaccagttttttggattgcaggagaagatcatgatttcgatgaagtgaatcatacatttgtttataacgaaaatcatgggtcgctgcataaggttaaatatcatacaatggagatgccagagacgacagtctctagatattatcctgataaggctgagttgaaacaaactttaaaaacgatgttcattcatatgaaagaaactgttcatacacaaggtctactggagatttgtgacagaattattgaccaatatgactcgtggactgatatgtttaaagcactactgcatgaaacatttaaagcatatggcgttctatttatagatgcgcagtttgagccgttaagaaaaatggaagcgcctatgtttaaaaagattttgaaaaaacatcagttgcttgatgatgcttttagagcaacacaacaacgtactcaaaatcaaggcttgaatgcgatgatacaaacagatacaaatgttcatttattcttacatgatgaaaatatgcgccaattagtttcgtatgatggtaagcattttaaattaaataaaacagataagacatatataaaggaagaaattataaatattgcggaaaatcaacctgaattattttctaataatgtagtgacaagaccattaatggaagaatggttatttaacacggtggcatttgttggaggaccgagtgaaattaagtactgggctgaactaaaagatgtatttgaactatttgatgttgaaatgcctatcgtgatgccaaggcttagaattacttatttaaatgaccgtatagaaaaattactttcgaaatacaatattccattagaaaaagtgttagtcgatggtgttgaaggagaaagaagtaagtttattagagaacaagcatcacatcaatttattgaaaaggtagaaggtatgattgaacaacagcgtcgtctaaacaaagacttattagatgaagtggcggggaatcaaaataatattaaccttgtgaataaaaataatgaaattcatatacaacagtatgattatttgttaaaacgttatcttttaaacattgaaagagaaaacgacatcagtatgaagcaatttagagaaattcaagaaacactccatccaatgggaggattacaagaaagaatatggaatccacttcaaattttgaatgattttgggacagatgtgttcaagccctccacctatccaccactttcttacacttttgatcatattattataaaaccttaatataccaagggtttagcccgatttatcttaatgataaatcgggcatttttttgttttttaaaataaatttcacaaattttgtataaatagtggtggatagtggggagatgtggtaaattatatataaggtgaggtgataaaaaatgttcatgggagaatacgatcatcaattagatacaaaaggacgtatgattataccgtccaagtttcgttatgacttaaatgagcgttttattatcacaagaggccttgataaatgtttattcggttacactctagacgaatggcaacagattgaagagaaaatgaaaaccttacctatgacaaaaaaagacgcacgtaagtttatgcgtatgttcttctctggtgctgttgaagtagaacttgataagcaagggcgtattaacatccctcaaaacttgaggaaatacgctaatttaactaaagaatgtacagtaatcggtgtttcaaatcgtattgagatttgggatagagaaacttggaatgatttctatgaagaatctgaagaaagtttcgaagatattgctgaagatttaatagattttgatttttaaaatggaggaattgaagtgtttcatcatatcagcgttatgttaaacgaaaccattgattatttaaatgtaaaagaaaatggtgtgtacattgactgtacgctaggtggagcgggacatgccctttatttactaaatcaattaaatgacgacggaagattaatagcaatcgatcaagaccaaactgcaattgataatgctaaagaggtattaaaggatcatttgcataaggtgacttttgttcatagcaacttccgtgaattaactcaaatattaaaagacttaaacattgaaaaagtagatggaatttattacgacttgggtgtttcaagcccacaactcgacattccagaacgaggattcagttatcaccatgacgcaacattagacatgcgtatggaccaaacacaagaactaacagcatatgaaattgttaacaattggtcatatgaagcgttagtgaagattttttatcgttatggcgaggagaaattttcaaaacagatagctcgaagaatcgaagcacatcgtgaacaacaaccaataacaacaacattagaattagttgacattataaaagaaggtattcctgcaaaagcaagaagaaaaggcggacatcctgcaaaacgagtatttcaagcactacgaattgcagtaaacgatgaattgtcagcttttgaagattcaatagaacaagcgattgaattagtgaaagtagacggcaggatttcggtaatcactttccattctttagaagatcgtttatgtaaacaggtgttccaagaatatgaaaaaggtccagaggtaccaagaggattgccagttataccagaagcatatacacctaagttaaagcgtgttaatcgtaaaccgattaccgctacagaagaagatttagatgacaataacagagcacgaagcgcgaaattacgtgtagctgaaatacttaaataaggagcaatttataatggctgtagaaaaagtgtaccaaccatatgacgaacaagtttataatagtataccgaagcaacaaccacaaactaagcccgaaaagaagactgtttcgagaaaagtggttgtacaattaactaaatttgaaaaagttttatacataactttgattactgtaattgctatgttaagtatttatatgctatctttaaaaatggatgcgtatgatacgcgaggaaagattgcagatttagattataaaatagataaacaatcaagtgaaaacagtgctttacaatctgaaatcaaaaagaattcttcttatgaacgcatatacgaaaaggctaagaaacaggggatgagccttgagaacgataatgtaaaggtagtgcgtagtaatggcgaagcaaaaaattaaaattaaaaaaaataaaataggggcagtcctacttgttggtttattcggactgctcttttttatattggttttaagaatttcatatatcatgattactggacattctaatggtcaagatttagtcatgaaggcaaatgaaaagtatttagttaagaatgcacaacaaccagaacgaggaaagatatatgatcgtaatggtaaagtgctagcagaagatgtagaaagatataaacttgttgcagtaatagataaaaaggcgagtgccaattctaaaaaacctaggcatgtagttgataaaaaagagactgcaaagaaattatctacagtcattgatatgaagccagaggaaattgaaaagagacttagtcaaaagaaagctttccaaattgaatttggacgcaaaggaacaaatttaacgtatcaggacaaattgaaaatagagaaaatgaatttgcctggtatttctttattgcctgaaacagaacgcttttatccaaatggcaattttgcatcacacttaattggtagagctcagaaaaatccggatactggtgaacttaaaggtgcacttggagttgaaaagatttttgatagttatttaagtggatctaaaggatcattgagatatattcatgatatttggggatatatcgcaccaaatactaaaaaagagaagcagcctaaacgtggtgatgatgtccatttaacaatcgattcaaatattcaagtatttgttgaagaagctttagatggcatggttgaaagataccagccgaaagatttatttgcggttgtcatggatgccaaaactggagaaattttagcatacagtcagcgaccaacatttaatcctgaaactggtaaagactttggtaaaaagtgggcaaatgacctttatcaaaacacatacgagcctggatcaacatttaaatcatatgggttagcagctgctattcaagaaggtgcttttgatcctgataagaaatataaatctggacatagagatattatgggttcacgtatttcagactggaatagagtcggttggggtgaaatcccaatgtcactcggatttacttattcatctaatacattgatgatgcatttacaagatttagttggtgcagacaaaatgaaatcttggtatgaacgatttggatttggaaaatcaactaaaggtatgtttgatggagaagcacctggtcaaattggatggagtaatgagttgcaacaaaaaacgtcatcatttggtcaatcgacaacagtaacacctgttcaaatgttacaggcgcaatcagcgttctttaatgatggtaatatgttaaaaccatggtttgtgaatagcgttgaaaatcctgttagtaaaagacaattttataaaggtcaaaaacaaatcgcaggcaaaccaataacaaaagatactgctgaaaaagttgaaaagcaattggatttagttgtgaatagtaagaagagtcacgctgcaaactatcgtattgatggttatgaggtcgaaggtaagactggtacagcacaagtcgctgcacctaatggtggtggatacgttaaaggtccaaacccatattttgtaagttttatgggtgacgcaccgaagaaaaatcctaaagttattgtatacgctggtatgagcttggcacaaaaaaatgaccaagaagcttatgaattaggtgttagtaaagcgtttaaaccaataatggaaaatactttgaaatatttaaatgtaggtaaatcaaaagatgacacatctaatgcagagtatagtaaagtgccagatgttgaaggtcaagacaaacaaaaagctattgataatgtgagtgcaaaatcattagaaccagttactatcggttctggcacacaaataaaagcacaatctataaaagcagggaataaagtcttacctcatagtaaagtactgttattaacagacggagacttaactatgcctgacatgtcaggatggacgaaagaagatgtcattgcttttgaaaacctaacaaatattaaagtaaatttaaaaggtagcggttttgtgtcccaccaatcaattagtaagggacaaaaacttactgaaaaagataaaatagacgtagaattttcatcagagaatgtagacagcaattcgacgaataattctgattcaaattcagatgataagaagaaatctgacagtaaaactgacaaggataagtcggactaacaagaatggctacattaaataagggtgtattgtcactatttgtttttactaaagtaatgctgtgatagaaaaaaacatcttcatttaatctttataaataagtgttgatagagaattttaaggtagacgaggtcagattaacttgtttgttataggcaaactttttatactggcctcttatgccgtaaaaaagaaaaattataaattttgattacaactttgtttatttaattgaaaaattgataatatattagtggttaaaaaagtctggattaagaagaggagatagttatgatttttgtatatgcgttattagcgctagtgattacatttgttttggtacctgttttaatacctacattaaaaaggatgaaatttggtcaaagtattcgagaagaaggtccacaaagccatatgaagaagactggtacaccaacgatgggtggactaacatttctattaagtattgtgataacgtctttggtggctattatatttgtagatcaagctaatccaatcatactgttattatttgtgacgattggttttgggttaattggttttatagatgattatattattgttgttaaaaagaataaccaaggtttaacaagtaaacagaagtttttggcgcaaattggtattgcgattattttctttgttttaagtaatgtgtttcatttggtgaatttttctacgagcatacatattccatttacgaatgtagcaatcccactatcatttgcatatgttattttcattgttttttggcaagtaggtttttctaatgcggtaaatttaacagatggtttagatggattagcaactggactgtcaattatcggatttacaatgtatgccatcatgagctttgtgttaggagaaacggcaattggtattttctgtatcattatgttgtttgcacttttaggatttttaccatataacattaaccctgctaaagtgtttatgggagatacaggtagcttagctttaggtggtatatttgctacgatttcaatcatgcttaatcaggaattatcattaatttttataggtttagtattcgtaattgaaacattatctgttatgttacaagtcgctagctttaaattgactggaaagcgtatatttaaaatgagtccgattcatcatcattttgaattgataggatggagcgaatggaaagtagttacagtattttgggctgttggtctgatttcaggtttaatcggtttatggattggagtgcattaagatgcttaattatacagggttagaaaataaaaatgtattagtcgtcggtttggcaaaaagtggttatgaagcagctaaattattaagtaaattaggtgcgaatgtgactgtcaatgatgggaaagacttatcgcaagatgctcatgcaaaagatttagaatctatgggtatttctgttgtaagtggaagtcatccattaacattgcttgataataatccaataattgttaaaaatcctggaataccttatacagtatctattattgatgaagcagtgaaacgaggtttgaaaattttaacagaagttgagttaagttatctaatctctgaagcaccaatcatagctgtaacgggtacaaatggtaaaacgacagttacttctctaattggagatatgtttaaaaaaagtcgcttaactggaagattatccggcaatattggttatgttgcatctaaagtagcacaagaagtaaagcctacagattatttagttacagagttgtcgtcattccagttacttggaattgaaaagtataaaccacacattgctataattactaacatttattcggcgcatctagattaccatgaaaatttagaaaactatcaaaatgctaaaaagcaaatatataaaaatcaaacggaagaagattatttgatttgtaattatcatcaaagacaagtgatagagtcggaagaattaaaagctaagacattgtatttctcaactcaacaagaagttgatggtatttatattaaagatggttttatcgtttataaaggtgttcgtattattaacactgaagatctagtattgcctggtgaacataatttagaaaatatattagcagctgtgcttgcttgtattttagctggtgtacctattaaagcaattattgatagtttaactacattttcaggaatagagcatagattgcaatatgttggtactaatagaactaataaatattataatgattccaaagcaacaaacacgctagcaacacagtttgccttaaattcatttaatcaaccaatcatttggttatgtggtggtttggatcgagggaatgaatttgacgaactcattccttatatggaaaatgttcgcgcgatggttgtattcggacaaacgaaagctaagtttgctaaactaggtaatagtcaagggaaatcggtcattgaagcgaacaatgtcgaagacgctgttgataaagtacaagatattatagaaccaaatgatgttgtattattgtcacctgcttgtgcgagttgggatcaatatagtacttttgaagagcgtggagagaaatttattgaaagattccgtgcccatttaccatcttattaaagggtgtgagtattgatggatgataaaacgaagaacgatcaacaagaatcaaatgaagataaagatgaattagaattatttacgaggaatacatctaagaaaagacggcaaagaaaaaggtcaaaggctacacatttttctaatcaaaataaagatgatacatctcaacaagctgattttgatgaagaaatttacttgataaataaagacttcaaaaaagaagaaagcaatgatgaaaataatggttctgcttctagtcatgcgaatgataataatatcgatgattctacagactctaatattgaaaatgaggattatagatataatcaagaaattgacgaccaaaatgaatcgaatggaattgcagtcggcaacgaacaacctcaatcagctcctaaagaacaaaatagcgactcgaatgatgaggaaacagtaacgaaaaaagaacgaaaaagtaaagtaacacaattaaagccattaacacttgaagaaaagcggaagttaagacgtaagcgacaaaaacgaatccaatacagtgttattacaatattagtattgttgattgctgttatattaatttacatgttttcaccacttagtaaaattgcgcatgtaaatataaatggaaataatcacgttagtacttcaaagataaacaaagttttaggtgttaaaaatgattcgaggatgtatacgtttagtaaaaaaaatgctattaatgatctcgaagaggatccattaatcaaaagtgttgagatacacaagcaattaccaaacacattaaacgtagatatcacagaaaatgaaattattgctttagtgaaatataaaggtaaatatttacctttattagaaaatggtaaattgcttaaaggttcaaatgatgtcaaaattaatgatgcacctgtcatggatggtttcaaaggtacaaaagaagatgatatgattaaggcgttatctgaaatgacacctgaagttagacgatatattgccgaagtgacatacgccccaagtaaaaacaaacaaagcagaattgaattgtttacgacagatggacttcaagtaatcggtgatatttcgacgatatctaagaaaatgaaatattatccgcagatgtcacaatcattatcaagggatagttcgggtaaactaaaaacaagaggctatattgatttatcagtcggtgcttcatttatcccataccgtggaaacacgtctagtcaatcagaaagcgataaaaatgtgactaaatcatctcaagaggaaaatcaagcaaaagaagaattacaaagcgttttaaacaaaattaacaaacaatcaagtaagaataattaaaaaattttgatattgtctatgtttatagttcacaagccattcaacgtattgtaaactaaggatagtgtatttttttaatagtaatttgtcaggaggtgcctatctatggaagaacattactacgtaagtattgatattggatcatcaagcgtaaaaacaatagtaggcgagaaatttcacaatggtataaatgtgataggtacaggacaaacctacacgagcggtataaaaaatggtttaattgatgattttgatattgcgcgacaagcaatcaaagacacaattaaaaaggcatcaatcgcttcgggtgttgatattaaagaagttttcctgaaattacctatcattggaacggaagtttatgatgaatcaaatgaaatcgacttttatgaggatacagaaatcaacggttcacatatcgaaaaagtattagaaggtattagagaaaaaaatgatgtgcaagaaacagaagtaattaatgtgttcccgattcgttttatagtcgataaagaaaatgaggtttcagaccctaaagaattaattgccagacattcattaaaggttgaagcaggcgtaattgctattcaaaaatcgattttaattaatatgattaaatgcgtagaagcatgtggtgttgatgtattagatgtttactctgatgcatataactatggttcaatcctaacagctactgaaaaagagttaggtgcatgtgtcattgatattggtgaagacgttacgcaagttgctttttatgaacgcggtgaattagtagatgctgattctatcgaaatggcagggcgtgatattacagacgatattgcacaaggattaaacacttcttatgaaactgctgaaaaagttaaacaccaatatggtcatgcattctatgattctgcttcagatcaagatatcttcactgttgaacaggttgatagtgatgaaacagtacagtatactcaaaaagatttgagtgactttattgaagcgcgtgtagaagaaatattcttcgaagtatttgatgttttacaagatttaggattaacaaaagtaaatggtgggtttattgtaactggtggatctgcaaacttacttggcgtaaaagaattattatcagatatggtaagtgaaaaagttagaattcacacgccatcacaaatgggaattagaaaacctgaattttcttcagcaatttctacaatttctagtagtatcgcttttgatgagttattagattatgttacaattaattatcatgataatgaagaaactgaagaagatgttattgatgtgaaagacaaagataacgaatctaaattaggcggatttgattggtttaaacgtaaaacaaacaaaaaagatactcatgaaaatgaagtagagtcaacagatgaagaaatttatcaatcagaagataatcatcaggaacataaacagaatcatgaacatgttcaagacaaagataaagataaagaagaaagtaaattcaaaaaactaatgaaatctctatttgaatgattattggccaataaaactaggaggaaatttaaatgttagaatttgaacaaggatttaatcatttagcgactttaaaggtcattggtgtaggtggtggcggtaacaacgccgtaaaccgaatgattgaccacggaatgaataatgttgaatttatcgctatcaacacagacggtcaagctttaaacttatctaaagctgaatctaaaatccaaatcggtgaaaaattaacacgtggtttaggagcaggagctaaccctgaaatcggtaaaaaagctgcagaggaatctcgtgaacaaattgaagatgcaatccaaggtgcagacatggtatttgttacttctggtatgggtggcggaactggtactggtgcagcaccagtcgttgctaaaattgcaaaagaaatgggcgcattaactgttggtgttgtaactcgtccatttagttttgaaggacgtaaacgtcaaactcaagctgctgctggagtagaagctatgaaagctgcagtagatacattaatcgttataccaaatgaccgtttattagatatcgttgacaaatctacgccaatgatggaagcatttaaagaagctgataacgtgttacgccaaggtgtacaaggtatctcagacttaatcgctgtttctggtgaagtaaacttagactttgcagacgttaagacaattatgtctaaccaaggttctgcattaatgggtattggtgtttcttctggtgaaaatagagcggtagaagctgctaaaaaagcaatctcttctccattacttgaaacatctatcgttggtgcacaaggtgtgcttatgaatattactggtggcgagtcattgtcattatttgaagcacaagaggctgctgatattgtccaagatgctgcagatgaagacgttaatatgattttcggtacagttattaatcctgaattacaagatgagattgttgtaacagttattgcaactggttttgatgacaaaccaacatcacatggtcgtaaatctggtagcactggattcggaacaagcgtaaatacttctagcaatgcaacttctaaagatgaatcattcacttcaaattcatcaaatgcacaagcaactgatagtgtaagtgaaagaacgcatacaactaaagaagatgatattccaagcttcattagaaatagagaagaaagacgttcaagaagaacaagacgttaa

SEQ ID NO: 45 - DNA, 10679 bp, Staphylococcus aureus
atgttcatgggagaatacgatcatcaattagatacaaaaggacgtatgattataccgtccaagtttcgttatgacttaaatgagcgttttattatcacaagaggccttgataaatgtttattcggttacactctagacgaatggcaacagattgaagagaaaatgaaaaccttacctatgacaaaaaaagacgcacgtaagtttatgcgtatgttcttctctggtgctgttgaagtagaacttgataagcaagggcgtattaacatccctcaaaacttgaggaaatacgctaatttaactaaagaatgtacagtaatcggtgtttcaaatcgtattgagatttgggatagagaaacttggaatgatttctatgaagaatctgaagaaagtttcgaagatattgctgaagatttaatagattttgatttttaaaatggaggaattgaagtgtttcatcatatcagcgttatgttaaacgaaaccattgattatttaaatgtaaaagaaaatggtgtgtacattgactgtacgctaggtggagcgggacatgccctttatttactaaatcaattaaatgacgacggaagattaatagcaatcgatcaagaccaaactgcaattgataatgctaaagaggtattaaaggatcatttgcataaggtgacttttgttcatagcaacttccgtgaattaactcaaatattaaaagacttaaacattgaaaaagtagatggaatttattacgacttgggtgtttcaagcccacaactcgacattccagaacgaggattcagttatcaccatgacgcaacattagacatgcgtatggaccaaacacaagaactaacagcatatgaaattgttaacaattggtcatatgaagcgttagtgaagattttttatcgttatggcgaggagaaattttcaaaacagatagctcgaagaatcgaagcacatcgtgaacaacaaccaataacaacaacattagaattagttgacattataaaagaaggtattcctgcaaaagcaagaagaaaaggcggacatcctgcaaaacgagtatttcaagcactacgaattgcagtaaacgatgaattgtcagcttttgaagattcaatagaacaagcgattgaattagtgaaagtagacggcaggatttcggtaatcactttccattctttagaagatcgtttatgtaaacaggtgttccaagaatatgaaaaaggtccagaggtaccaagaggattgccagttataccagaagcatatacacctaagttaaagcgtgttaatcgtaaaccgattaccgctacagaagaagatttagatgacaataacagagcacgaagcgcgaaattacgtgtagctgaaatacttaaataaggagcaatttataatggctgtagaaaaagtgtaccaaccatatgacgaacaagtttataatagtataccgaagcaacaaccacaaactaagcccgaaaagaagactgtttcgagaaaagtggttgtacaattaactaaatttgaaaaagttttatacataactttgattactgtaattgctatgttaagtatttatatgctatctttaaaaatggatgcgtatgatacgcgaggaaagattgcagatttagattataaaatagataaacaatcaagtgaaaacagtgctttacaatctgaaatcaaaaagaattcttcttatgaacgcatatacgaaaaggctaagaaacaggggatgagccttgagaacgataatgtaaaggtagtgcgtagtaatggcgaagcaaaaaattaaaattaaaaaaaataaaataggggcagtcctacttgttggtttattcggactgctcttttttatattggttttaagaatttcatatatcatgattactggacattctaatggtcaagatttagtcatgaaggcaaatgaaaagtatttagttaagaatgcacaacaaccagaacgaggaaagatatatgatcgtaatggtaaagtgctagcagaagatgtagaaagatataaacttgttgcagtaatagataaaaaggcgagtgccaattctaaaaaacctaggcatgtagttgataaaaaagagactgcaaagaaattatctacagtcattgatatgaagccagaggaaattgaaaagagacttagtcaaaagaaagctttccaaattgaatttggacgcaaaggaacaaatttaacgtatcaggacaaattgaaaatagagaaaatgaatttgcctggtatttctttattgcctgaaacagaacgcttttatccaaatggcaattttgcatcacacttaattggtagagctcagaaaaatccggatactggtgaacttaaaggtgcacttggagttgaaaagatttttgatagttatttaagtggatctaaaggatcattgagatatattcatgatatttggggatatatcgcaccaaatactaaaaaagagaagcagcctaaacgtggtgatgatgtccatttaacaatcgattcaaatattcaagtatttgttgaagaagctttagatggcatggttgaaagataccagccgaaagatttatttgcggttgtcatggatgccaaaactggagaaattttagcatacagtcagcgaccaacatttaatcctgaaactggtaaagactttggtaaaaagtgggcaaatgacctttatcaaaacacatacgagcctggatcaacatttaaatcatatgggttagcagctgctattcaagaaggtgcttttgatcctgataagaaatataaatctggacatagagatattatgggttcacgtatttcagactggaatagagtcggttggggtgaaatcccaatgtcactcggatttacttattcatctaatacattgatgatgcatttacaagatttagttggtgcagacaaaatgaaatcttggtatgaacgatttggatttggaaaatcaactaaaggtatgtttgatggagaagcacctggtcaaattggatggagtaatgagttgcaacaaaaaacgtcatcatttggtcaatcgacaacagtaacacctgttcaaatgttacaggcgcaatcagcgttctttaatgatggtaatatgttaaaaccatggtttgtgaatagcgttgaaaatcctgttagtaaaagacaattttataaaggtcaaaaacaaatcgcaggcaaaccaataacaaaagatactgctgaaaaagttgaaaagcaattggatttagttgtgaatagtaagaagagtcacgctgcaaactatcgtattgatggttatgaggtcgaaggtaagactggtacagcacaagtcgctgcacctaatggtggtggatacgttaaaggtccaaacccatattttgtaagttttatgggtgacgcaccgaagaaaaatcctaaagttattgtatacgctggtatgagcttggcacaaaaaaatgaccaagaagcttatgaattaggtgttagtaaagcgtttaaaccaataatggaaaatactttgaaatatttaaatgtaggtaaatcaaaagatgacacatctaatgcagagtatagtaaagtgccagatgttgaaggtcaagacaaacaaaaagctattgataatgtgagtgcaaaatcattagaaccagttactatcggttctggcacacaaataaaagcacaatctataaaagcagggaataaagtcttacctcatagtaaagtactgttattaacagacggagacttaactatgcctgacatgtcaggatggacgaaagaagatgtcattgcttttgaaaacctaacaaatattaaagtaaatttaaaaggtagcggttttgtgtcccaccaatcaattagtaagggacaaaaacttactgaaaaagataaaatagacgtagaattttcatcagagaatgtagacagcaattcgacgaataattctgattcaaattcagatgataagaagaaatctgacagtaaaactgacaaggataagtcggactaacaagaatggctacattaaataagggtgtattgtcactatttgtttttactaaagtaatgctgtgatagaaaaaaacatcttcatttaatctttataaataagtgttgatagagaattttaaggtagacgaggtcagattaacttgtttgttataggcaaactttttatactggcctcttatgccgtaaaaaagaaaaattataaattttgattacaactttgtttatttaattgaaaaattgataatatattagtggttaaaaaagtctggattaagaagaggagatagttatgatttttgtatatgcgttattagcgctagtgattacatttgttttggtacctgttttaatacctacattaaaaaggatgaaatttggtcaaagtattcgagaagaaggtccacaaagccatatgaagaagactggtacaccaacgatgggtggactaacatttctattaagtattgtgataacgtctttggtggctattatatttgtagatcaagctaatccaatcatactgttattatttgtgacgattggttttgggttaattggttttatagatgattatattattgttgttaaaaagaataaccaaggtttaacaagtaaacagaagtttttggcgcaaattggtattgcgattattttctttgttttaagtaatgtgtttcatttggtgaatttttctacgagcatacatattccatttacgaatgtagcaatcccactatcatttgcatatgttattttcattgttttttggcaagtaggtttttctaatgcggtaaatttaacagatggtttagatggattagcaactggactgtcaattatcggatttacaatgtatgccatcatgagctttgtgttaggagaaacggcaattggtattttctgtatcattatgttgtttgcacttttaggatttttaccatataacattaaccctgctaaagtgtttatgggagatacaggtagcttagctttaggtggtatatttgctacgatttcaatcatgcttaatcaggaattatcattaatttttataggtttagtattcgtaattgaaacattatctgttatgttacaagtcgctagctttaaattgactggaaagcgtatatttaaaatgagtccgattcatcatcattttgaattgataggatggagcgaatggaaagtagttacagtattttgggctgttggtctgatttcaggtttaatcggtttatggattggagtgcattaagatgcttaattatacagggttagaaaataaaaatgtattagtcgtcggtttggcaaaaagtggttatgaagcagctaaattattaagtaaattaggtgcgaatgtgactgtcaatgatgggaaagacttatcgcaagatgctcatgcaaaagatttagaatctatgggtatttctgttgtaagtggaagtcatccattaacattgcttgataataatccaataattgttaaaaatcctggaataccttatacagtatctattattgatgaagcagtgaaacgaggtttgaaaattttaacagaagttgagttaagttatctaatctctgaagcaccaatcatagctgtaacgggtacaaatggtaaaacgacagttacttctctaattggagatatgtttaaaaaaagtcgcttaactggaagattatccggcaatattggttatgttgcatctaaagtagcacaagaagtaaagcctacagattatttagttacagagttgtcgtcattccagttacttggaattgaaaagtataaaccacacattgctataattactaacatttattcggcgcatctagattaccatgaaaatttagaaaactatcaaaatgctaaaaagcaaatatataaaaatcaaacggaagaagattatttgatttgtaattatcatcaaagacaagtgatagagtcggaagaattaaaagctaagacattgtatttctcaactcaacaagaagttgatggtatttatattaaagatggttttatcgtttataaaggtgttcgtattattaacactgaagatctagtattgcctggtgaacataatttagaaaatatattagcagctgtgcttgcttgtattttagctggtgtacctattaaagcaattattgatagtttaactacattttcaggaatagagcatagattgcaatatgttggtactaatagaactaataaatattataatgattccaaagcaacaaacacgctagcaacacagtttgccttaaattcatttaatcaaccaatcatttggttatgtggtggtttggatcgagggaatgaatttgacgaactcattccttatatggaaaatgttcgcgcgatggttgtattcggacaaacgaaagctaagtttgctaaactaggtaatagtcaagggaaatcggtcattgaagcgaacaatgtcgaagacgctgttgataaagtacaagatattatagaaccaaatgatgttgtattattgtcacctgcttgtgcgagttgggatcaatatagtacttttgaagagcgtggagagaaatttattgaaagattccgtgcccatttaccatcttattaaagggtgtgagtattgatggatgataaaacgaagaacgatcaacaagaatcaaatgaagataaagatgaattagaattatttacgaggaatacatctaagaaaagacggcaaagaaaaaggtcaaaggctacacatttttctaatcaaaataaagatgatacatctcaacaagctgattttgatgaagaaatttacttgataaataaagacttcaaaaaagaagaaagcaatgatgaaaataatggttctgcttctagtcatgcgaatgataataatatcgatgattctacagactctaatattgaaaatgaggattatagatataatcaagaaattgacgaccaaaatgaatcgaatggaattgcagtcggcaacgaacaacctcaatcagctcctaaagaacaaaatagcgactcgaatgatgaggaaacagtaacgaaaaaagaacgaaaaagtaaagtaacacaattaaagccattaacacttgaagaaaagcggaagttaagacgtaagcgacaaaaacgaatccaatacagtgttattacaatattagtattgttgattgctgttatattaatttacatgttttcaccacttagtaaaattgcgcatgtaaatataaatggaaataatcacgttagtacttcaaagataaacaaagttttaggtgttaaaaatgattcgaggatgtatacgtttagtaaaaaaaatgctattaatgatctcgaagaggatccattaatcaaaagtgttgagatacacaagcaattaccaaacacattaaacgtagatatcacagaaaatgaaattattgctttagtgaaatataaaggtaaatatttacctttattagaaaatggtaaattgcttaaaggttcaaatgatgtcaaaattaatgatgcacctgtcatggatggtttcaaaggtacaaaagaagatgatatgattaaggcgttatctgaaatgacacctgaagttagacgatatattgccgaagtgacatacgccccaagtaaaaacaaacaaagcagaattgaattgtttacgacagatggacttcaagtaatcggtgatatttcgacgatatctaagaaaatgaaatattatccgcagatgtcacaatcattatcaagggatagttcgggtaaactaaaaacaagaggctatattgatttatcagtcggtgcttcatttatcccataccgtggaaacacgtctagtcaatcagaaagcgataaaaatgtgactaaatcatctcaagaggaaaatcaagcaaaagaagaattacaaagcgttttaaacaaaattaacaaacaatcaagtaagaataattaaaaaattttgatattgtctatgtttatagttcacaagccattcaacgtattgtaaactaaggatagtgtatttttttaatagtaatttgtcaggaggtgcctatctatggaagaacattactacgtaagtattgatattggatcatcaagcgtaaaaacaatagtaggcgagaaatttcacaatggtataaatgtgataggtacaggacaaacctacacgagcggtataaaaaatggtttaattgatgattttgatattgcgcgacaagcaatcaaagacacaattaaaaaggcatcaatcgcttcgggtgttgatattaaagaagttttcctgaaattacctatcattggaacggaagtttatgatgaatcaaatgaaatcgacttttatgaggatacagaaatcaacggttcacatatcgaaaaagtattagaaggtattagagaaaaaaatgatgtgcaagaaacagaagtaattaatgtgttcccgattcgttttatagtcgataaagaaaatgaggtttcagaccctaaagaattaattgccagacattcattaaaggttgaagcaggcgtaattgctattcaaaaatcgattttaattaatatgattaaatgcgtagaagcatgtggtgttgatgtattagatgtttactctgatgcatataactatggttcaatcctaacagctactgaaaaagagttaggtgcatgtgtcattgatattggtgaagacgttacgcaagttgctttttatgaacgcggtgaattagtagatgctgattctatcgaaatggcagggcgtgatattacagacgatattgcacaaggattaaacacttcttatgaaactgctgaaaaagttaaacaccaatatggtcatgcattctatgattctgcttcagatcaagatatcttcactgttgaacaggttgatagtgatgaaacagtacagtatactcaaaaagatttgagtgactttattgaagcgcgtgtagaagaaatattcttcgaagtatttgatgttttacaagatttaggattaacaaaagtaaatggtgggtttattgtaactggtggatctgcaaacttacttggcgtaaaagaattattatcagatatggtaagtgaaaaagttagaattcacacgccatcacaaatgggaattagaaaacctgaattttcttcagcaatttctacaatttctagtagtatcgcttttgatgagttattagattatgttacaattaattatcatgataatgaagaaactgaagaagatgttattgatgtgaaagacaaagataacgaatctaaattaggcggatttgattggtttaaacgtaaaacaaacaaaaaagatactcatgaaaatgaagtagagtcaacagatgaagaaatttatcaatcagaagataatcatcaggaacataaacagaatcatgaacatgttcaagacaaagataaagataaagaagaaagtaaattcaaaaaactaatgaaatctctatttgaatgattattggccaataaaactaggaggaaatttaaatgttagaatttgaacaaggatttaatcatttagcgactttaaaggtcattggtgtaggtggtggcggtaacaacgccgtaaaccgaatgattgaccacggaatgaataatgttgaatttatcgctatcaacacagacggtcaagctttaaacttatctaaagctgaatctaaaatccaaatcggtgaaaaattaacacgtggtttaggagcaggagctaaccctgaaatcggtaaaaaagctgcagaggaatctcgtgaacaaattgaagatgcaatccaaggtgcagacatggtatttgttacttctggtatgggtggcggaactggtactggtgcagcaccagtcgttgctaaaattgcaaaagaaatgggcgcattaactgttggtgttgtaactcgtccatttagttttgaaggacgtaaacgtcaaactcaagctgctgctggagtagaagctatgaaagctgcagtagatacattaatcgttataccaaatgaccgtttattagatatcgttgacaaatctacgccaatgatggaagcatttaaagaagctgataacgtgttacgccaaggtgtacaaggtatctcagacttaatcgctgtttctggtgaagtaaacttagactttgcagacgttaagacaattatgtctaaccaaggttctgcattaatgggtattggtgtttcttctggtgaaaatagagcggtagaagctgctaaaaaagcaatctcttctccattacttgaaacatctatcgttggtgcacaaggtgtgcttatgaatattactggtggcgagtcattgtcattatttgaagcacaagaggctgctgatattgtccaagatgctgcagatgaagacgttaatatgattttcggtacagttattaatcctgaattacaagatgagattgttgtaacagttattgcaactggttttgatgacaaaccaacatcacatggtcgtaaatctggtagcactggattcggaacaagcgtaaatacttctagcaatgcaacttctaaagatgaatcattcacttcaaattcatcaaatgcacaagcaactgatagtgtaagtgaaagaacgcatacaactaaagaagatgatattccaagcttcattagaaatagagaagaaagacgttcaagaagaacaagacgttaa

SEQ ID NO: 46 - DNA, 4013 bp, Staphylococcus aureus
atgttcatgggagaatacgatcatcaattagatacaaaaggacgtatgattataccgtccaagtttcgttatgacttaaatgagcgttttattatcacaagaggccttgataaatgtttattcggttacactctagacgaatggcaacagattgaagagaaaatgaaaaccttacctatgacaaaaaaagacgcacgtaagtttatgcgtatgttcttctctggtgctgttgaagtagaacttgataagcaagggcgtattaacatccctcaaaacttgaggaaatacgctaatttaactaaagaatgtacagtaatcggtgtttcaaatcgtattgagatttgggatagagaaacttggaatgatttctatgaagaatctgaagaaagtttcgaagatattgctgaagatttaatagattttgatttttaaaatggaggaattgaagtgtttcatcatatcagcgttatgttaaacgaaaccattgattatttaaatgtaaaagaaaatggtgtgtacattgactgtacgctaggtggagcgggacatgccctttatttactaaatcaattaaatgacgacggaagattaatagcaatcgatcaagaccaaactgcaattgataatgctaaagaggtattaaaggatcatttgcataaggtgacttttgttcatagcaacttccgtgaattaactcaaatattaaaagacttaaacattgaaaaagtagatggaatttattacgacttgggtgtttcaagcccacaactcgacattccagaacgaggattcagttatcaccatgacgcaacattagacatgcgtatggaccaaacacaagaactaacagcatatgaaattgttaacaattggtcatatgaagcgttagtgaagattttttatcgttatggcgaggagaaattttcaaaacagatagctcgaagaatcgaagcacatcgtgaacaacaaccaataacaacaacattagaattagttgacattataaaagaaggtattcctgcaaaagcaagaagaaaaggcggacatcctgcaaaacgagtatttcaagcactacgaattgcagtaaacgatgaattgtcagcttttgaagattcaatagaacaagcgattgaattagtgaaagtagacggcaggatttcggtaatcactttccattctttagaagatcgtttatgtaaacaggtgttccaagaatatgaaaaaggtccagaggtaccaagaggattgccagttataccagaagcatatacacctaagttaaagcgtgttaatcgtaaaccgattaccgctacagaagaagatttagatgacaataacagagcacgaagcgcgaaattacgtgtagctgaaatacttaaataaggagcaatttataatggctgtagaaaaagtgtaccaaccatatgacgaacaagtttataatagtataccgaagcaacaaccacaaactaagcccgaaaagaagactgtttcgagaaaagtggttgtacaattaactaaatttgaaaaagttttatacataactttgattactgtaattgctatgttaagtatttatatgctatctttaaaaatggatgcgtatgatacgcgaggaaagattgcagatttagattataaaatagataaacaatcaagtgaaaacagtgctttacaatctgaaatcaaaaagaattcttcttatgaacgcatatacgaaaaggctaagaaacaggggatgagccttgagaacgataatgtaaaggtagtgcgtagtaatggcgaagcaaaaaattaaaattaaaaaaaataaaataggggcagtcctacttgttggtttattcggactgctcttttttatattggttttaagaatttcatatatcatgattactggacattctaatggtcaagatttagtcatgaaggcaaatgaaaagtatttagttaagaatgcacaacaaccagaacgaggaaagatatatgatcgtaatggtaaagtgctagcagaagatgtagaaagatataaacttgttgcagtaatagataaaaaggcgagtgccaattctaaaaaacctaggcatgtagttgataaaaaagagactgcaaagaaattatctacagtcattgatatgaagccagaggaaattgaaaagagacttagtcaaaagaaagctttccaaattgaatttggacgcaaaggaacaaatttaacgtatcaggacaaattgaaaatagagaaaatgaatttgcctggtatttctttattgcctgaaacagaacgcttttatccaaatggcaattttgcatcacacttaattggtagagctcagaaaaatccggatactggtgaacttaaaggtgcacttggagttgaaaagatttttgatagttatttaagtggatctaaaggatcattgagatatattcatgatatttggggatatatcgcaccaaatactaaaaaagagaagcagcctaaacgtggtgatgatgtccatttaacaatcgattcaaatattcaagtatttgttgaagaagctttagatggcatggttgaaagataccagccgaaagatttatttgcggttgtcatggatgccaaaactggagaaattttagcatacagtcagcgaccaacatttaatcctgaaactggtaaagactttggtaaaaagtgggcaaatgacctttatcaaaacacatacgagcctggatcaacatttaaatcatatgggttagcagctgctattcaagaaggtgcttttgatcctgataagaaatataaatctggacatagagatattatgggttcacgtatttcagactggaatagagtcggttggggtgaaatcccaatgtcactcggatttacttattcatctaatacattgatgatgcatttacaagatttagttggtgcagacaaaatgaaatcttggtatgaacgatttggatttggaaaatcaactaaaggtatgtttgatggagaagcacctggtcaaattggatggagtaatgagttgcaacaaaaaacgtcatcatttggtcaatcgacaacagtaacacctgttcaaatgttacaggcgcaatcagcgttctttaatgatggtaatatgttaaaaccatggtttgtgaatagcgttgaaaatcctgttagtaaaagacaattttataaaggtcaaaaacaaatcgcaggcaaaccaataacaaaagatactgctgaaaaagttgaaaagcaattggatttagttgtgaatagtaagaagagtcacgctgcaaactatcgtattgatggttatgaggtcgaaggtaagactggtacagcacaagtcgctgcacctaatggtggtggatacgttaaaggtccaaacccatattttgtaagttttatgggtgacgcaccgaagaaaaatcctaaagttattgtatacgctggtatgagcttggcacaaaaaaatgaccaagaagcttatgaattaggtgttagtaaagcgtttaaaccaataatggaaaatactttgaaatatttaaatgtaggtaaatcaaaagatgacacatctaatgcagagtatagtaaagtgccagatgttgaaggtcaagacaaacaaaaagctattgataatgtgagtgcaaaatcattagaaccagttactatcggttctggcacacaaataaaagcacaatctataaaagcagggaataaagtcttacctcatagtaaagtactgttattaacagacggagacttaactatgcctgacatgtcaggatggacgaaagaagatgtcattgcttttgaaaacctaacaaatattaaagtaaatttaaaaggtagcggttttgtgtcccaccaatcaattagtaagggacaaaaacttactgaaaaagataaaatagacgtagaattttcatcagagaatgtagacagcaattcgacgaataattctgattcaaattcagatgataagaagaaatctgacagtaaaactgacaaggataagtcggactaa

SEQ ID NO: 47 - DNA, 6375 bp, Staphylococcus aureus
atgatttttgtatatgcgttattagcgctagtgattacatttgttttggtacctgttttaatacctacattaaaaaggatgaaatttggtcaaagtattcgagaagaaggtccacaaagccatatgaagaagactggtacaccaacgatgggtggactaacatttctattaagtattgtgataacgtctttggtggctattatatttgtagatcaagctaatccaatcatactgttattatttgtgacgattggttttgggttaattggttttatagatgattatattattgttgttaaaaagaataaccaaggtttaacaagtaaacagaagtttttggcgcaaattggtattgcgattattttctttgttttaagtaatgtgtttcatttggtgaatttttctacgagcatacatattccatttacgaatgtagcaatcccactatcatttgcatatgttattttcattgttttttggcaagtaggtttttctaatgcggtaaatttaacagatggtttagatggattagcaactggactgtcaattatcggatttacaatgtatgccatcatgagctttgtgttaggagaaacggcaattggtattttctgtatcattatgttgtttgcacttttaggatttttaccatataacattaaccctgctaaagtgtttatgggagatacaggtagcttagctttaggtggtatatttgctacgatttcaatcatgcttaatcaggaattatcattaatttttataggtttagtattcgtaattgaaacattatctgttatgttacaagtcgctagctttaaattgactggaaagcgtatatttaaaatgagtccgattcatcatcattttgaattgataggatggagcgaatggaaagtagttacagtattttgggctgttggtctgatttcaggtttaatcggtttatggattggagtgcattaagatgcttaattatacagggttagaaaataaaaatgtattagtcgtcggtttggcaaaaagtggttatgaagcagctaaattattaagtaaattaggtgcgaatgtgactgtcaatgatgggaaagacttatcgcaagatgctcatgcaaaagatttagaatctatgggtatttctgttgtaagtggaagtcatccattaacattgcttgataataatccaataattgttaaaaatcctggaataccttatacagtatctattattgatgaagcagtgaaacgaggtttgaaaattttaacagaagttgagttaagttatctaatctctgaagcaccaatcatagctgtaacgggtacaaatggtaaaacgacagttacttctctaattggagatatgtttaaaaaaagtcgcttaactggaagattatccggcaatattggttatgttgcatctaaagtagcacaagaagtaaagcctacagattatttagttacagagttgtcgtcattccagttacttggaattgaaaagtataaaccacacattgctataattactaacatttattcggcgcatctagattaccatgaaaatttagaaaactatcaaaatgctaaaaagcaaatatataaaaatcaaacggaagaagattatttgatttgtaattatcatcaaagacaagtgatagagtcggaagaattaaaagctaagacattgtatttctcaactcaacaagaagttgatggtatttatattaaagatggttttatcgtttataaaggtgttcgtattattaacactgaagatctagtattgcctggtgaacataatttagaaaatatattagcagctgtgcttgcttgtattttagctggtgtacctattaaagcaattattgatagtttaactacattttcaggaatagagcatagattgcaatatgttggtactaatagaactaataaatattataatgattccaaagcaacaaacacgctagcaacacagtttgccttaaattcatttaatcaaccaatcatttggttatgtggtggtttggatcgagggaatgaatttgacgaactcattccttatatggaaaatgttcgcgcgatggttgtattcggacaaacgaaagctaagtttgctaaactaggtaatagtcaagggaaatcggtcattgaagcgaacaatgtcgaagacgctgttgataaagtacaagatattatagaaccaaatgatgttgtattattgtcacctgcttgtgcgagttgggatcaatatagtacttttgaagagcgtggagagaaatttattgaaagattccgtgcccatttaccatcttattaaagggtgtgagtattgatggatgataaaacgaagaacgatcaacaagaatcaaatgaagataaagatgaattagaattatttacgaggaatacatctaagaaaagacggcaaagaaaaaggtcaaaggctacacatttttctaatcaaaataaagatgatacatctcaacaagctgattttgatgaagaaatttacttgataaataaagacttcaaaaaagaagaaagcaatgatgaaaataatggttctgcttctagtcatgcgaatgataataatatcgatgattctacagactctaatattgaaaatgaggattatagatataatcaagaaattgacgaccaaaatgaatcgaatggaattgcagtcggcaacgaacaacctcaatcagctcctaaagaacaaaatagcgactcgaatgatgaggaaacagtaacgaaaaaagaacgaaaaagtaaagtaacacaattaaagccattaacacttgaagaaaagcggaagttaagacgtaagcgacaaaaacgaatccaatacagtgttattacaatattagtattgttgattgctgttatattaatttacatgttttcaccacttagtaaaattgcgcatgtaaatataaatggaaataatcacgttagtacttcaaagataaacaaagttttaggtgttaaaaatgattcgaggatgtatacgtttagtaaaaaaaatgctattaatgatctcgaagaggatccattaatcaaaagtgttgagatacacaagcaattaccaaacacattaaacgtagatatcacagaaaatgaaattattgctttagtgaaatataaaggtaaatatttacctttattagaaaatggtaaattgcttaaaggttcaaatgatgtcaaaattaatgatgcacctgtcatggatggtttcaaaggtacaaaagaagatgatatgattaaggcgttatctgaaatgacacctgaagttagacgatatattgccgaagtgacatacgccccaagtaaaaacaaacaaagcagaattgaattgtttacgacagatggacttcaagtaatcggtgatatttcgacgatatctaagaaaatgaaatattatccgcagatgtcacaatcattatcaagggatagttcgggtaaactaaaaacaagaggctatattgatttatcagtcggtgcttcatttatcccataccgtggaaacacgtctagtcaatcagaaagcgataaaaatgtgactaaatcatctcaagaggaaaatcaagcaaaagaagaattacaaagcgttttaaacaaaattaacaaacaatcaagtaagaataattaaaaaattttgatattgtctatgtttatagttcacaagccattcaacgtattgtaaactaaggatagtgtatttttttaatagtaatttgtcaggaggtgcctatctatggaagaacattactacgtaagtattgatattggatcatcaagcgtaaaaacaatagtaggcgagaaatttcacaatggtataaatgtgataggtacaggacaaacctacacgagcggtataaaaaatggtttaattgatgattttgatattgcgcgacaagcaatcaaagacacaattaaaaaggcatcaatcgcttcgggtgttgatattaaagaagttttcctgaaattacctatcattggaacggaagtttatgatgaatcaaatgaaatcgacttttatgaggatacagaaatcaacggttcacatatcgaaaaagtattagaaggtattagagaaaaaaatgatgtgcaagaaacagaagtaattaatgtgttcccgattcgttttatagtcgataaagaaaatgaggtttcagaccctaaagaattaattgccagacattcattaaaggttgaagcaggcgtaattgctattcaaaaatcgattttaattaatatgattaaatgcgtagaagcatgtggtgttgatgtattagatgtttactctgatgcatataactatggttcaatcctaacagctactgaaaaagagttaggtgcatgtgtcattgatattggtgaagacgttacgcaagttgctttttatgaacgcggtgaattagtagatgctgattctatcgaaatggcagggcgtgatattacagacgatattgcacaaggattaaacacttcttatgaaactgctgaaaaagttaaacaccaatatggtcatgcattctatgattctgcttcagatcaagatatcttcactgttgaacaggttgatagtgatgaaacagtacagtatactcaaaaagatttgagtgactttattgaagcgcgtgtagaagaaatattcttcgaagtatttgatgttttacaagatttaggattaacaaaagtaaatggtgggtttattgtaactggtggatctgcaaacttacttggcgtaaaagaattattatcagatatggtaagtgaaaaagttagaattcacacgccatcacaaatgggaattagaaaacctgaattttcttcagcaatttctacaatttctagtagtatcgcttttgatgagttattagattatgttacaattaattatcatgataatgaagaaactgaagaagatgttattgatgtgaaagacaaagataacgaatctaaattaggcggatttgattggtttaaacgtaaaacaaacaaaaaagatactcatgaaaatgaagtagagtcaacagatgaagaaatttatcaatcagaagataatcatcaggaacataaacagaatcatgaacatgttcaagacaaagataaagataaagaagaaagtaaattcaaaaaactaatgaaatctctatttgaatgattattggccaataaaactaggaggaaatttaaatgttagaatttgaacaaggatttaatcatttagcgactttaaaggtcattggtgtaggtggtggcggtaacaacgccgtaaaccgaatgattgaccacggaatgaataatgttgaatttatcgctatcaacacagacggtcaagctttaaacttatctaaagctgaatctaaaatccaaatcggtgaaaaattaacacgtggtttaggagcaggagctaaccctgaaatcggtaaaaaagctgcagaggaatctcgtgaacaaattgaagatgcaatccaaggtgcagacatggtatttgttacttctggtatgggtggcggaactggtactggtgcagcaccagtcgttgctaaaattgcaaaagaaatgggcgcattaactgttggtgttgtaactcgtccatttagttttgaaggacgtaaacgtcaaactcaagctgctgctggagtagaagctatgaaagctgcagtagatacattaatcgttataccaaatgaccgtttattagatatcgttgacaaatctacgccaatgatggaagcatttaaagaagctgataacgtgttacgccaaggtgtacaaggtatctcagacttaatcgctgtttctggtgaagtaaacttagactttgcagacgttaagacaattatgtctaaccaaggttctgcattaatgggtattggtgtttcttctggtgaaaatagagcggtagaagctgctaaaaaagcaatctcttctccattacttgaaacatctatcgttggtgcacaaggtgtgcttatgaatattactggtggcgagtcattgtcattatttgaagcacaagaggctgctgatattgtccaagatgctgcagatgaagacgttaatatgattttcggtacagttattaatcctgaattacaagatgagattgttgtaacagttattgcaactggttttgatgacaaaccaacatcacatggtcgtaaatctggtagcactggattcggaacaagcgtaaatacttctagcaatgcaacttctaaagatgaatcattcacttcaaattcatcaaatgcacaagcaactgatagtgtaagtgaaagaacgcatacaactaaagaagatgatattccaagcttcattagaaatagagaagaaagacgttcaagaagaacaagacgttaa

SEQ ID NO: 48 - DNA, 2317 bp, Staphylococcus aureus
atgatttttgtatatgcgttattagcgctagtgattacatttgttttggtacctgttttaatacctacattaaaaaggatgaaatttggtcaaagtattcgagaagaaggtccacaaagccatatgaagaagactggtacaccaacgatgggtggactaacatttctattaagtattgtgataacgtctttggtggctattatatttgtagatcaagctaatccaatcatactgttattatttgtgacgattggttttgggttaattggttttatagatgattatattattgttgttaaaaagaataaccaaggtttaacaagtaaacagaagtttttggcgcaaattggtattgcgattattttctttgttttaagtaatgtgtttcatttggtgaatttttctacgagcatacatattccatttacgaatgtagcaatcccactatcatttgcatatgttattttcattgttttttggcaagtaggtttttctaatgcggtaaatttaacagatggtttagatggattagcaactggactgtcaattatcggatttacaatgtatgccatcatgagctttgtgttaggagaaacggcaattggtattttctgtatcattatgttgtttgcacttttaggatttttaccatataacattaaccctgctaaagtgtttatgggagatacaggtagcttagctttaggtggtatatttgctacgatttcaatcatgcttaatcaggaattatcattaatttttataggtttagtattcgtaattgaaacattatctgttatgttacaagtcgctagctttaaattgactggaaagcgtatatttaaaatgagtccgattcatcatcattttgaattgataggatggagcgaatggaaagtagttacagtattttgggctgttggtctgatttcaggtttaatcggtttatggattggagtgcattaagatgcttaattatacagggttagaaaataaaaatgtattagtcgtcggtttggcaaaaagtggttatgaagcagctaaattattaagtaaattaggtgcgaatgtgactgtcaatgatgggaaagacttatcgcaagatgctcatgcaaaagatttagaatctatgggtatttctgttgtaagtggaagtcatccattaacattgcttgataataatccaataattgttaaaaatcctggaataccttatacagtatctattattgatgaagcagtgaaacgaggtttgaaaattttaacagaagttgagttaagttatctaatctctgaagcaccaatcatagctgtaacgggtacaaatggtaaaacgacagttacttctctaattggagatatgtttaaaaaaagtcgcttaactggaagattatccggcaatattggttatgttgcatctaaagtagcacaagaagtaaagcctacagattatttagttacagagttgtcgtcattccagttacttggaattgaaaagtataaaccacacattgctataattactaacatttattcggcgcatctagattaccatgaaaatttagaaaactatcaaaatgctaaaaagcaaatatataaaaatcaaacggaagaagattatttgatttgtaattatcatcaaagacaagtgatagagtcggaagaattaaaagctaagacattgtatttctcaactcaacaagaagttgatggtatttatattaaagatggttttatcgtttataaaggtgttcgtattattaacactgaagatctagtattgcctggtgaacataatttagaaaatatattagcagctgtgcttgcttgtattttagctggtgtacctattaaagcaattattgatagtttaactacattttcaggaatagagcatagattgcaatatgttggtactaatagaactaataaatattataatgattccaaagcaacaaacacgctagcaacacagtttgccttaaattcatttaatcaaccaatcatttggttatgtggtggtttggatcgagggaatgaatttgacgaactcattccttatatggaaaatgttcgcgcgatggttgtattcggacaaacgaaagctaagtttgctaaactaggtaatagtcaagggaaatcggtcattgaagcgaacaatgtcgaagacgctgttgataaagtacaagatattatagaaccaaatgatgttgtattattgtcacctgcttgtgcgagttgggatcaatatagtacttttgaagagcgtggagagaaatttattgaaagattccgtgcccatttaccatcttattaa

SEQ ID NO: 49 - DNA, 4043 bp, Staphylococcus aureus
atggatgataaaacgaagaacgatcaacaagaatcaaatgaagataaagatgaattagaattatttacgaggaatacatctaagaaaagacggcaaagaaaaaggtcaaaggctacacatttttctaatcaaaataaagatgatacatctcaacaagctgattttgatgaagaaatttacttgataaataaagacttcaaaaaagaagaaagcaatgatgaaaataatggttctgcttctagtcatgcgaatgataataatatcgatgattctacagactctaatattgaaaatgaggattatagatataatcaagaaattgacgaccaaaatgaatcgaatggaattgcagtcggcaacgaacaacctcaatcagctcctaaagaacaaaatagcgactcgaatgatgaggaaacagtaacgaaaaaagaacgaaaaagtaaagtaacacaattaaagccattaacacttgaagaaaagcggaagttaagacgtaagcgacaaaaacgaatccaatacagtgttattacaatattagtattgttgattgctgttatattaatttacatgttttcaccacttagtaaaattgcgcatgtaaatataaatggaaataatcacgttagtacttcaaagataaacaaagttttaggtgttaaaaatgattcgaggatgtatacgtttagtaaaaaaaatgctattaatgatctcgaagaggatccattaatcaaaagtgttgagatacacaagcaattaccaaacacattaaacgtagatatcacagaaaatgaaattattgctttagtgaaatataaaggtaaatatttacctttattagaaaatggtaaattgcttaaaggttcaaatgatgtcaaaattaatgatgcacctgtcatggatggtttcaaaggtacaaaagaagatgatatgattaaggcgttatctgaaatgacacctgaagttagacgatatattgccgaagtgacatacgccccaagtaaaaacaaacaaagcagaattgaattgtttacgacagatggacttcaagtaatcggtgatatttcgacgatatctaagaaaatgaaatattatccgcagatgtcacaatcattatcaagggatagttcgggtaaactaaaaacaagaggctatattgatttatcagtcggtgcttcatttatcccataccgtggaaacacgtctagtcaatcagaaagcgataaaaatgtgactaaatcatctcaagaggaaaatcaagcaaaagaagaattacaaagcgttttaaacaaaattaacaaacaatcaagtaagaataattaaaaaattttgatattgtctatgtttatagttcacaagccattcaacgtattgtaaactaaggatagtgtatttttttaatagtaatttgtcaggaggtgcctatctatggaagaacattactacgtaagtattgatattggatcatcaagcgtaaaaacaatagtaggcgagaaatttcacaatggtataaatgtgataggtacaggacaaacctacacgagcggtataaaaaatggtttaattgatgattttgatattgcgcgacaagcaatcaaagacacaattaaaaaggcatcaatcgcttcgggtgttgatattaaagaagttttcctgaaattacctatcattggaacggaagtttatgatgaatcaaatgaaatcgacttttatgaggatacagaaatcaacggttcacatatcgaaaaagtattagaaggtattagagaaaaaaatgatgtgcaagaaacagaagtaattaatgtgttcccgattcgttttatagtcgataaagaaaatgaggtttcagaccctaaagaattaattgccagacattcattaaaggttgaagcaggcgtaattgctattcaaaaatcgattttaattaatatgattaaatgcgtagaagcatgtggtgttgatgtattagatgtttactctgatgcatataactatggttcaatcctaacagctactgaaaaagagttaggtgcatgtgtcattgatattggtgaagacgttacgcaagttgctttttatgaacgcggtgaattagtagatgctgattctatcgaaatggcagggcgtgatattacagacgatattgcacaaggattaaacacttcttatgaaactgctgaaaaagttaaacaccaatatggtcatgcattctatgattctgcttcagatcaagatatcttcactgttgaacaggttgatagtgatgaaacagtacagtatactcaaaaagatttgagtgactttattgaagcgcgtgtagaagaaatattcttcgaagtatttgatgttttacaagatttaggattaacaaaagtaaatggtgggtttattgtaactggtggatctgcaaacttacttggcgtaaaagaattattatcagatatggtaagtgaaaaagttagaattcacacgccatcacaaatgggaattagaaaacctgaattttcttcagcaatttctacaatttctagtagtatcgcttttgatgagttattagattatgttacaattaattatcatgataatgaagaaactgaagaagatgttattgatgtgaaagacaaagataacgaatctaaattaggcggatttgattggtttaaacgtaaaacaaacaaaaaagatactcatgaaaatgaagtagagtcaacagatgaagaaatttatcaatcagaagataatcatcaggaacataaacagaatcatgaacatgttcaagacaaagataaagataaagaagaaagtaaattcaaaaaactaatgaaatctctatttgaatgattattggccaataaaactaggaggaaatttaaatgttagaatttgaacaaggatttaatcatttagcgactttaaaggtcattggtgtaggtggtggcggtaacaacgccgtaaaccgaatgattgaccacggaatgaataatgttgaatttatcgctatcaacacagacggtcaagctttaaacttatctaaagctgaatctaaaatccaaatcggtgaaaaattaacacgtggtttaggagcaggagctaaccctgaaatcggtaaaaaagctgcagaggaatctcgtgaacaaattgaagatgcaatccaaggtgcagacatggtatttgttacttctggtatgggtggcggaactggtactggtgcagcaccagtcgttgctaaaattgcaaaagaaatgggcgcattaactgttggtgttgtaactcgtccatttagttttgaaggacgtaaacgtcaaactcaagctgctgctggagtagaagctatgaaagctgcagtagatacattaatcgttataccaaatgaccgtttattagatatcgttgacaaatctacgccaatgatggaagcatttaaagaagctgataacgtgttacgccaaggtgtacaaggtatctcagacttaatcgctgtttctggtgaagtaaacttagactttgcagacgttaagacaattatgtctaaccaaggttctgcattaatgggtattggtgtttcttctggtgaaaatagagcggtagaagctgctaaaaaagcaatctcttctccattacttgaaacatctatcgttggtgcacaaggtgtgcttatgaatattactggtggcgagtcattgtcattatttgaagcacaagaggctgctgatattgtccaagatgctgcagatgaagacgttaatatgattttcggtacagttattaatcctgaattacaagatgagattgttgtaacagttattgcaactggttttgatgacaaaccaacatcacatggtcgtaaatctggtagcactggattcggaacaagcgtaaatacttctagcaatgcaacttctaaagatgaatcattcacttcaaattcatcaaatgcacaagcaactgatagtgtaagtgaaagaacgcatacaactaaagaagatgatattccaagcttcattagaaatagagaagaaagacgttcaagaagaacaagacgttaa

SEQ ID NO: 50 - DNA, 4665 bp, Staphylococcus aureus
atggataatgaaaaaggattgttaatcgttttatcaggaccatctggagtaggtaaaggtactgttagaaaacgaatatttgaagatccaagtacatcatataagtattctatttcaatgacaacacgtcaaatgcgtgaaggtgaagttgatggcgtagattacttttttaaaactagggatgcgtttgaagctttaattaaagatgaccaatttatagaatatgctgaatatgtaggcaactattatggtacaccagttcaatatgttaaagatacaatggacgaaggtcatgatgtatttttagaaattgaagtagaaggtgcaaagcaagttagaaagaaatttccagatgcgttatttattttcttagcacctccaagtttagatcacttgagagagcgattagtaggtagaggaacagaatccaatgagaaaatacaaagtcgtattaacgaagcgcgtaaagaagttgaaatgatgaatttatacgattacgttgtagttaatgatgaagtagaacttgcgaagaatagaattcaatgtattgtagaagctgagcacttaaaaagagagcgcgtagaagctaagtatagaaaaatgattttggaggctaaaaaataatgttaaatccacctttaaaccaattaacgtcacaaattaaatcaaagtatttaattgcaacaactgcagcgaaaagagcgcgtgaaattgatgaacaacctgaaactgaattattaagtgaatatcattcatttaaaccagttggtagagcgttagaagaaattgctgacggtaaaattcgccctgttatttcaagtgattattatggtaaagaatagtttcgaccattaaaaatatgtgaagctagacgtacatcaaatacgtcaaggcatatccaaatcaaacgcacctatgtaggtgtgtttttttagtttatccaatgattgatgttataataatactaaatttgtatctataaaaaagtaatgagcatttgtgcgcatatgatgatgtaaagcgtaaatgtcatagtgatatttaagggagattgaatatgaagaaaatattattagccgttacaggtggcattgcggcatataaagcaattgatttgacaagtaagttaacacaatctgggtatgaagttcgcgttatgttaacgaatcacgcacaaaaatttgtgacaccattagcatttcaagcaataagtcgaaatgctgtttatacagatacttttatagaagaaaatccttcagaaatacagcatattgcattaggtgattgggcagatgcaatcattgttgcacctgcaacggcaaatacaattgcaaaattgagtgtaggtattgctgatgatttggtgacatcaacgttgctagcaacagagacaccgaaatttattgcgcctgctatgaatgtgcatatgtatgaaaataaacgtacgcagcaaaatattaatattttaaaagaagatgggtatcattttatcgaaccaggaagcggatttctagcatgtggttatgttgctaaaggacgtatggaagaaccgcttcaaatcgtttctgttattgatgctcattttcaaaatagtaatcgtttagctaatagttcatttcaagataaacgcgcattggttacagcaggaccaactattgaagttatcgatccagtcagatttgtatccaatcgttcttctggaaaaatgggctatgcaatagctgaagcattgcgaaatcgaggagctatcgtgacgttagttgctggtcctacaacactagaggatccaaaagatattgaagttattcatgttcaaagtgctgaagaaatgtttgaacaagtgacaagccgatttgacgaacaagatattgttgtaaaagcagcagccgtatctgactatacaccggttgatgtattagaacataagatgaaaaagcaggatggtgatttgtcagtatcttttaaacgtactaaagacattcttaaatatttaggtgaacataaaacatcacagtatttaataggctttgcagcagagactgaagatattgaaaattatgcacaacaaaaattacgcaagaaaaatgcagatgtgattatttcaaataatgttggggatatgtctatcggatttagttctgatgataatgaattgacaatgcattttaaaaataatgaaaaggtaaatatcaagaaaggaaaaaaagtagtattagctgcacaaattttagatgaactagaaactaggtggcaataatgatagcgaaagtcatagtcgatgtcgcgtcgaagagcgttgactataaatttgattatataattcccgaacaactcgaatctgtcatccaacctggtgtgcgtgtaattgtaccttttggaccaagaacgattcaaggttatgtaatggaagtaacagcagaacctgatgcacaacttgacgtttcgaagttaaaaaaaatcatagaagtgaaagatatacaaccagaattaacatcagaattaatagctttaagtgagtggatgggttcaactcatgtcattaaacgtatttctatgctagaagtgatgcttccaagtgctattaaagcgaagtataaaaaagcatttaagatgaaagatgacatagagctaccttcagctttattacaaaaatttgataagcatggttactattattataaagatgcgcaaaaaaataatgatattcaattgcttatgaagttgttaaaagatgatatcgttgaagaaaaaacgattctcacacaaaatataactaaaaaaaccaagcgtgctgttcgtgtcattgaagggtatcatcctgatgaagtattagctaagttggagaaagttattaaacaatacgatttgtatgcttacttgtctgaagaacaacataaaacaatatttttaactgatattgaggatatgggcttttcaaaatccagtttagatggacttatcaaaaaaggttatgttgaaaaatatgacgcggttgttgaaagagacccatttaaagatcgtgttttcgaacaagaatcaaaacagcaattaacagaagaccaatataaagcatatgaagcgattaaagctaaaattgtaagccaagagcaagaaacatttttacttcatggtgtgacgggatcaggtaaaacagaagtatatttacaaacgatagaagatgttttaagccaaggaaaacaggcgatgatgttagttcctgaaatcgctctaacaccgcaaatggttttacgcttcaaacgtcgatttggtgatgacgttgctgtattacattctggcttatctaatggggaacgttatgatgagtggcaaaaaattagggatgatcgtgcgagagtaagtgttggtgcaaggtcaagtgtgttcgcacctttcaaaaatttagggttaatcatcattgatgaagaacatgaatctacatataaacaagaagattatccgagatatcacgctagagaaattgcccaatggcgaagtgaatatcatcactgtccagtcattttaggaagtgcaacaccatgtcttgaaagttatgcacgagctgaaaaagacgtttatcatttgctatcattaccaaacagagtgaaccaacaagctttacctgaaattgatatagtagacatgcgtgaagaattgagtgaaggtaatcggtcaatgttttcaaaagatttacgtgaagccatacaattaagattagatcgacaggaacaagttgttttatttttaaatcgacgtggttatgcatcgtttatgttatgtcgggattgtggatatgtaccgcaatgtccaaactgtgatatttcattaacgtatcataaaacgacagacttattaaaatgtcactattgtggttaccaagagacgccaccgaatcaatgtccaaattgtgagagtgaacacattcgacaagtaggtactggtactcagaaagttgaagaactattgcaacaagaatttgaagatgcgcgcataattaggatggatgtagatacaacctcaaagaaaggtgcacatgaaaagttattgactgaattcgaaaaaggtaacggtgacattttactaggtactcagatgattgcgaaaggattagattatccaaatattactttagttggtgtgctgaatgcagatacaatgttaaatttacctgattttcgggcgagcgaacgtacttatcaactattaacgcaagtggctggtagagctggtcgtcatgaaaaggcaggtcaagtcatcattcaaacgtataatccagatcattattcaatattggatgttcaaaaaaatgattatttaacattttatcgtcaggaaatggaatatcgtaaattaggaaagtatccaccgtattattatttgattaatttcacaatctcacataaagaaatgaagaaggttatggaagcatcgcagcatgttcataaaattttattacagcatttaacagaaaaagcgcttgtactaggtccatctccggcagcacttgcgagaatcaacaatgaatttagattccaaattttagtgaaatataaaagtgaacctggattattacaagccattcagtttttagatgactattaccatgaaaaatttataaaagaaaaattagcattgaagattgatattgatccacagatgatgatgtaa

SEQ ID NO: 51 - DNA, 8955 bp, Staphylococcus aureus
atggcgattaaaaagttagtaccagcatcgcatcctattttaacgaaaaaagcgcaagcagttaaaacatttgatgattcgttaaaaagattattacaagatttagaagatacaatgtatgcacaagaagctgctggcttatgtgcacctcaaattaatcagtcattgcaagtggcaattattgatatggaaatggaaggattattacaacttgttaatccgaaaattattagtcaatcaaatgaaacaataacagacttagaaggttcaattacattgccagatgtttacggcgaagtgacaagaagtaaaatgatagttgttgaaagttatgacgtcaatgggaacaaagttgaactaactgcacatgaagatgtagcaagaatgattttgcatattatagatcaaatgaacggtatcccttttacagaacgtgcggaccgtattttaacagataaagaagtggaggcatattttataaatgactaaaataatatttatgggtacaccagacttttcaacaactgttttagaaatgcttattgcagaacatgatgtcattgcagtcgtaacgcaaccagatcgacctgttggacgtaaacgtgttatgacaccaccaccagttaaaaaagttgcaatgaaatatgatttacctgtatatcagcctgaaaaattaagtggatcagaagaattagaacaattgcttcaattagatgtagatttaattgtaactgctgcttttggacaattattacctgaatcattgttggcattaccaaaacttggcgcaattaatgtacatgcatcattgttaccaaagtatagaggtggtgcaccaattcatcaggcaattatcgatggtgaacaagaaaccggcataacaattatgtatatggttaaaaaattagatgcgggtaatattatttcgcaacaagcaattaaaatagaagaaaatgataatgtcggtacgatgcatgataaattaagtgtattaggggcagatttattaaaagaaactttaccatctattatagagggcacaaatgaaagtgtacctcaagatgatacgcaagcaacatttgcttccaatattcgacgcgaagatgagcgaattagctggaataaaccaggaagacaagtgtttaatcaaattcgtggattatcaccatggccagttgcttatacaactatggatgacactaacttgaaaatatacgatgctgaactcgttgagactaataagataaacgagcctggaaccattatagaaacgactaaaaaagccattattgttgctacaaatgataatgaagctgttgcaattaaagatatgcaattagctgggaaaaagagaatgttagctgccaattatttaagtggtgcgcaaaacacactagtagggaagaaacttatatgatcgaaaacgtgagaagtcttgcttttgacacgattcaagatatattaaatgaaggtgcgtatagtaacttgcgtatcaatgaagtgttgtcagaaaatgaattaaatgcaatggataaggctttatttacagaaattgtctacggaaccgttaaaagaaaatatacgttagatttttatttaaagccttttgtgaaaacaaagattaaggcatgggttaggcaattattatggatgagtatttatcaatatgtatatttagataaagttccaaatcatgccattattaatgaagcagttgaaatagcaaaagaacgcggtggctatcataatggtaatgtcgtaaatggtattttacgtacaatgatgcgtagtgacttacctgattttaatgaaattgcagatcctaaaaaaagaatggcaatcgagtatagtatgccgaagtggattatagatcattgggcaacacattatggtctcgaagaaactgaaacaattttacagtcatttttagaaacgacatcaacaactgtgcgtgccaacctgacgcgagcatcattagatgatattattgaaaagttgcaagacgaaggttatgacgttgaaaaagatcatgacttaccttattgtctccatataggaggacaaccaattattcattctcgttcatttaaagatggattcgtttcaattcaagataaaagctcaatgtttgttgcacacattatgaatgtagaccgacatgatcacgtattagatgcatgtagtgcacctggcggtaaagcttgtcacattgctgaagttttaatgccagaagggcaagttgacgcttcagatatacatgatcacaaaatagacttaattaattttaatataaaaaaattacgattaacaaatattaaggcttttcaacatgatgcgacaaaaccttatgataaaacatacgataagatacttgttgatgcaccatgtagcggattaggtgtaatgagacataagccggagattaagtatactcaaagcaaacaacatattgagtcactagttgaattacagcttgaaatattggaaaatgtaaaaaacaatgtaaaaataggtggcgaaatcatctattcaacatgtacaattgagcaactagaaaatgaaaacgtgatttatacgtttctgaaaaataataaaaacttcgaatttgaaccgtttcaacatccgataactggagagttggtcaaaacgttacaaatcatgccgcaagactttaattcagatggattctttatcactaagataaaaagaaaggacaattaggaatgataactgctgaaaagaaaaagaagaataaatttcttccaaattttgacaagcaatcaatatattcattgcgatttgacgaaatgcaaaactggctcgttgaacaaggtcaacaaaaatttcgagcgaaacagatttttgaatggttatatcaaaaaagagtagattcgattgatgaaatgacgaacttatcgaaagacttacgacagcttttaaaagataactttactgttacaactttaacaactgtagtaaaacaagaaagtaaagacggtacaattaaattcttatttgaattacaagatggctatacaattgaaactgttttaatgagacatgattatggaaattcagtatgtgtaacgacacaagtaggttgtcgtatcggatgtacgttttgtgcttctacacttggcggcttaaaaagaaaccttgaagctggcgaaattgtttcacaagttttaacagttcaaaaagcccttgatgctacagaagagcgcgtatctcaaattgtcataatgggtatcggtgaaccatttgaaaattatgatgaaatgatggactttttaagaatcgtcaatgatgataacagtttaaatattggtgcacgtcacattacagtatcaacatcaggtatcattcctagaatatatgactttgcggatgaagatatccaaattaattttgctgtaagcttacacgccgcaaaagatgaagtgcgatcacgcttgatgccaattaaccgtgcatataatgttgagaagttaatcgaagcaattcaatattatcaagaaaaaacaaatcgtcgtgttacttttgaatatggtctgtttggtggtgtgaatgaccaactagaacatgcaagagaattagcacatttaataaaaggcttaaactgccatgttaacttaattcctgtcaaccatgttccagaaagaaattatgtgaaaacggctaaaaatgatatctttaaatttgaaaaagaattaaagagactaggaattaatgccacaatacgtcgtgaacaaggttcggatattgacgcagcttgtggtcaattaagagcaaaggaacgacaagtagaaacgaggtaaagacaaatgctagaggcacaattttttactgatactggacaacatagagataagaatgaagatgcgggtggtattttttataatcaaactaatcaacaacttttagttctgtgtgatggtatgggcggccataaagcaggagaagttgcaagtaaatttgttacagatgagttgaaatcccgttttgaagcggaaaatcttatagaagaacatcaagctgaaaattggttgcgtaataatataaaagatataaattttcagttatatcactatgcacaagaaaatgcagaatataaaggtatgggtacaacatgtgtttgtgcacttgtttttgaaaaatcagttgtgatagcaaatgtcggtgattctagagcctatgttattaatagtagacaaattgaacaaattactagtgatcactcatttgttaatcatcttgttttaacgggtcaaattacgccggaagaagcatttacacatccacaacgtaatattattacgaaggtgatgggcacagataaacgtgtgagtccagatttgtttattaagcgattaaatttttatgattatttattattaaattcagatggattaactgattatgttaaagacaatgaaattaagcgtttgttagtaaaagaaggtacaatagaagatcatggtgatcaattaatgcaattggcattagataaccattcgaaagataacgttactttcatactcgcggctattgaaggtgataaagtatgataggtaaaataataaatgaacgatataaaattgtagataagcttggcggcggtggcatgagtaccgtttatcttgcagaagatacgatacttaacattaaagttgcaattaaggcgatttttataccacctagagaaaaagaagaaacattaaaacgttttgaacgagaagtacataactcatcacagctatcacatcaaaatatagtaagtatgatcgatgttgatgaagaagatgactgttactacttagtaatggaatatattgaaggtccgactttgtctgagtatattgaaagtcatgggccattaagtgttgacacggcgattaattttacgaatcaaatattggatggcattaaacatgcgcatgatatgcgtattgtacatagagatattaagccacaaaatatattaattgacagcaataaaacgttgaaaatatttgattttggaattgctaaagctttaagtgagacgtctttaactcagactaatcatgtgttaggtactgtgcagtacttttcgccagaacaagcaaaaggtgaggcaacggatgaatgtacagatatttattctataggtattgtgttatatgaaatgcttgttggtgaaccaccctttaatggagaaactgcagttagcattgcgattaaacatattcaggattctgtgccaaatgtgacaacagatgtacgtaaggatattccgcaatctttaagtaatgtcattttacgcgctacagaaaaagacaaagcgaatcgttacaaaacaattcaagaaatgaaagatgatttgagtagtgttttacatgaaaatcgagcgaatgaagatgtctatgaactcgataaaatgaaaacgatagcggtacctttgaaaaaagaagatctagcaaagcatattagtgaacataagtcgaatcaacctaaacgtgaaacgacgcaagtacctattgtaaatgggcctgctcatcatcagcaattccaaaagccagaaggtacggtgtacgaaccaaaacctaaaaagaaatcaacacgaaagattgtgctcttatcactaatcttttcgttgttaatgattgcacttgtttcttttgtggcaatggcaatgtttggtaataaatacgaagagacacctgatgtaatcgggaaatctgtaaaagaagcagagcaaatattcaataaaaacaacctgaaattgggtaaaatttctagaagttatagtgataaatatcctgaaaatgaaattattaagacaactcctaatactggtgaacgtgttgaacgtggtgacagtgttgatgttgttatatcaaagggccctgaaaaggttaaaatgccaaatgtcattggtttacctaaggaggaagcattgcagaaattaaaatcgttaggtcttaaagatgttacgattgaaaaagtatataataatcaagcgccaaaaggatacattgcaaatcaaagtgtaaccgcaaatactgaaatcgctattcatgattctaatattaaactatatgaatctttaggcattaagcaagtttatgtagaagactttgagcataaatcctttagcaaagctaaaaaagccttagaagaaaaagggtttaaagttgaaagtaaggaagagtatagtgacgatattgatgagggtgatgtgatttctcaatctcctaaaggaaaatcagtagatgaggggtcaacgatttcatttgttgtttctaaaggtaaaaaaagtgactcatcagatgtcaaaacgacaactgaatcggtagatgtaccatacactggtaaaaatgataagtcacaaaaagttaaagtttatattaaagataaagataatgacggttcaactgaaaaaggtagtttcgacattactagtgatcaacgtatagacattcctttaagaattgaaaaaggaaaaacagcaagttatattgttaaagttgacggtaaaactgtagctgaaaaagaagtcagctatgatgatatttaaatataattgaagtaaatgtaccgaggtttctatttggaagtctcggtatttttatgttgagattgcggtagttttaaaatgcttaatgtcatcatttacagttgagcattgtctatcaattctgtatcactctcacaatatttatatcatttgaaatgatcatttatatattaattttccagtctttgatataataaatgcagtaaaattaatcgagaggtgccattttgaagacaggtcgaatagtgaaatcaattagtggggtatatcaagtagacgttaatggcgaacgtttcaatacaaaaccacgaggattatttagaaagaaaaaattttcaccggtagttggtgatatagtggaatttgaagtacaaaacattaacgaaggctatattcatcaagtgtttgagcggaaaaatgagttgaaaagaccacctgtaagtaatatagatacactagtaattgtaatgagtgctgtcgagccaaatttttcaacgcaattattagatcgatttttagttattgcacattcgtatcagttaaatgcgagagttttggtgactaaaaaagataaaacaccaattgaaaagcagttcgaaattaatgagttgttgaaaatatatgaaaatattggctatgagactgaatttattggaaatgatgatgatcgaaaaaaaattgtagaagcttggccagctggacttatagtacttagtggtcaatcaggtgtcggtaagtccactttcttaaatcattatcgtccagaacttaatcttgagacaaatgatatatcaaaatcattaaatcgaggaaagcatactacaagacatgtcgaactattcgaacgtcaaaacggttatattgcagacacacctggattcagtgctttagattttgatcatatagataaagatgaaataaaagattattttcttgaattaaatcgatatggtgaaacatgtaagtttaggaattgtaatcatatcaaagaacctaattgtaatgttaagcatcaattagagatagggaatattgcgcaatttagatacgaccattatttacaactatttaatgaaatttcaaatagaaaggttagatattaaatgacaaaactatatccatcattattatctgttgattttttggatttacaacatgaattaaaacgacttgaagaagcaggtgtcgacggagttcattttgatgttatggatggtcaatttgtgcctaatatatctattggtttaccaatattagatgcagtaagaaaaggcacaacattacctatagacgtacatttgatgattgaaaatccagaaaagtatattgcatcatttgcagaacatggtgccgatatgatttcaattcatgtcgaatcaacgcctcatattcatcgtgctattcaaatgattaaacatttagataaaaaagctggtgtagtaattaatcctggtacaccaatatcacaaattgaacctattttagacattgttgattatgtattagtgatgacagttaacccagggtttggtggtcaatcatttattgatcaatgcgtagaaaaaatagcgggtcttaatgctattaaaatggaacgtcaattaaactttgatattgaagttgatggaggcgtaaataccgatacagcgaaagtttgtgttgaaaatggtgctacaatgctagtaacaggttcatttttctttaaacaagaagattataaaaaagtcacacaagcattgaaaggttgagtgtatatgcatataaatttattatgttctaatcgacacttgccgcaagatatttgggccaaaagtaatgaaggtaaatggggcggcgttgatagaggtgctttgattttattgaagcatcaaattatcccttttttctcagtgggagactttgattcagtcagtaaagaagaacgccaacttctaacagaacagttacaaatcaaaccagttcaagctgaaaaagctgatacggatttagctttagcggttgataaagctgttgcacttggatttgatagtattacaatttatggtgcaacaggcggacgattagatcacttttttggggcaattcagttattattgaaaaaagcatattataaacatgatgttcatatagaagttatcgatcaacaaaataaaattgaattattgcctaaaggtcaacatacagttgaaaaagataagagttatccgtacatttcatttataccgatgactgatgatgtagaactttctctagcaggttttaaatataatttagctagacaaatgcttaatataggttctactttaactatttcaaatgaaattgagtctttgcaagcgaaagtaactgtacatgatgggttgattttgcaaattagaagtacagatttaaattaa

SEQ ID NO: 52 - DNA, 7698 bp, Staphylococcus aureus
atgacattagagatttcaaatgattacggtaaaattgatatttcaaacgaagtgattgcttcggttgtaggtggaaaggccgttgaatgttatggtattgtaggtatggcatctagacaacaagttagagatggtattgcggaaatactaggacatgaaaattatgctaaaggcatcaaagtaactgaaaataatggcgtagtggatatagatatgtacattattgtaagttatggtgtgaaaatatctgaagttgccaataatgtacaatcaacagtgaaatatactttggaaaaatcacttaatgtatcagtaaattcaatcaatatatatgtacaaggtgtacgtgtgaataatacaggcaagaaagcttaggaggacaacttgaaatgattagcaaaattaatggtaaattatttgccgatatgattatacaaggggcacaaaatttatctaacaatgcagatttggtagattctttgaatgtgtatccagtgccagatggtgatacaggaacaaatatgaatcttactatgacttcaggtcgcgaagaagtagagaataatttgtcgaaaaatatcggcgaattaggtaaaacattctcgaaaggtttactaatgggtgcaagaggtaactctggtgtcatcttgtcacaattattcagaggattttgtaaaaatattgaaagtgaatctgaaattaattcaaaattgttagctgaaagttttcaagctggtgttgaaacggcatataaagctgttatgaaaccagttgaaggtacaatacttacagttgcaaaagatgctgcgcaagctgcaatagaaaaagcaaataatactgaagattgtatagaattaatggagtacattattgtaaaagccaatgaatcacttgaaaacacaccaaacttattagctgtacttaaagaagttggtgttgttgatagtggcggtaaaggtttgttatgcgtttacgaaggattcttaaaagcgcttaaaggtgaaaaagttgaagccaaagttgcaaagatagataaagatgaatttgtacatgatgaacatgatttccatggtgtaattaatactgaagatattatttatggctattgtactgaaatgatggttcgttttggaaagaataaaaaagcctttgatgaacaagaattcaggcaagatatgagtcaatttggtgattctttattagtcattaatgatgaagaaattgtgaaagttcacgtgcataccgaatacccaggtaaagtgtttaattatggtcaacaatatggtgaattaattaaacttaaggttgaaaatatgagagaacagcaccgtgaagtgattcgaaaagaacagcacacagctaaaccgaaaatggaaacggttgaaacagcaattattactatttctatgggtgaaggtatttcagagatattcaaatcaatgggtgccacacatatcattagtggtggacaaacgatgaatccttctacagaagatatcgttaaagtcattgaacaatcaaaatgtaaacgtgcaattattttaccgaataataaaaatattttaatggcaagtgaacaagcagcgagtattgttgatgcagaagcagttgttattccaacgaaatctattcctcaaggtataagcgcactattccaatatgatgtggacgcaacacttgaagaaaataaagcgcaaatggctgattcagtaaataacgttaaatctggttcattaacgtacgctgttcgtgatacgaaaattgatggcgttgagattaaaaaagacgcgtttatgggcttgattgaagataagattgtaagcagccaaagtgatcaattaacaacggttactgagttgttaaatgagatgttagcagaagatagtgaaatattgactgtgattattggtcaagatgcagagcaagcagttacagataacatgataaactggatcgaagagcaatatccagatgtagaagtggaagttcatgaaggtggacaaccaatttatcaatatttcttttcagtagaataaaaatttaaaataaaaaactaccaatgataaatcatcagttggtagttttttattttgctattttagtgttattgcgggttaaaagtatcattctcgagttgctaacaatgtcatgttcaacttagtcatgataaaataaataacatactaaatgatacgtaaaatcaaataaaacataggtgatttattttggctaaagtaaacttaatagaaagtccatattctcttttacaattaaaaggtataggtcctaagaaaatagaagtattgcaacaactaaatattcatacagtggaagatcttgttctttatttgccaactagatatgaagataatacagtgattgatttgaatcaagcagaagatcaatctaacgttacgatagaaggacaagtatatacagctccagtagttgcattttttggaagaaataaatcaaaattaaccgttcatttaatggtaaataatattgctgtcaaatgtatttttttcaatcaaccgtatttaaaaaagaaaatcgaattaaatcaaactataactgttaaaggtaagtggaatagagttaaacaggaaattactggtaatagggttttctttaattcacaagggacacaaactcaagaaaacgcagatgttcaattagaaccagtctatcgtattaaggaaggtattaaacaaaagcaaatacgagaccaaattagacaagcgttaaatgatgtgacaattcatgaatggttaactgatgaactaagagaaaaatataaattagagaccttggactttactttgaacacattacatcatcctaaaagtaaagaggatttattacgtgctcgtagaacctatgcatttactgaactgtttttattcgaattacgtatgcaatggctaaatagattagaaaagtcatctgacgaagcaattgaaattgattatgacttagaccaagttaaatcatttattgatcgtttaccttttgaactaactgaagcacagaaatccagtgttaatgaaatttttagagatttaaaagcaccaatacgtatgcatcgattacttcaaggtgatgtaggttcaggaaaaacagtagttgctgcaatttgtatgtatgcgttaaaaacggctggttatcaatcagcattgatggtaccaactgaaattttagcagagcaacatgctgaaagtttaatggctttatttggagattctatgaacgttgcattgttaactgggtcagtaaaaggtaagaaacgaaagatacttttagaacaacttgaaaatggtacgattgattgtttaattggaacccatgctttgattcaagatgatgtgattttccataatgttggtttagtaattacagatgaacaacatcgatttggtgtgaatcaacgccagcttttaagagaaaaaggtgcaatgacgaatgtgttatttatgacagcaacgccgataccaagaacactagcaatatcagtttttggtgagatggatgtgtcttcaattaaacaattaccaaaaggtcgtaaacctatcattactacttgggcaaagcatgagcaatacgataaagttttgatgcaaatgacctcagagttgaaaaaaggtcgtcaagcatatgtcatttgcccgctaatagaaagttctgagcatctcgaagatgttcaaaatgttgtcgcattgtacgagtctttacaacagtattatggtgtttcccgtgtagggttattgcatggtaagttatctgccgatgaaaaagatgaggtcatgcaaaagtttagtaatcatgagatagatgttttagtttctactactgttgttgaagtaggtgttaatgtaccgaatgcaacttttatgatgatttatgatgcggatcgctttggattatcaactttacatcagttacgcggtcgtgtaggtagaagtgaccagcaaagttactgtgttttaattgcatcccctaaaacagaaacaggaattgaaagaatgacaattatgacacaaacaacggatggatttgaattgagtgaacgagacttagaaatgcgtggtcctggagatttctttggtgttaaacaaagtgggttgccagatttcttagttgccaatttagttgaagattatcgtatgttagaagttgctcgtgatgaagcagctgaacttattcaatctggcgtattctttgaaaatacgtatcaacatttacgtcattttgttgaagaaaatttattacatcgcagttttgactaattaccatgctgatttgtcaatttgagtgcaacacttcgttaattgagtgatatgacacttgaactatttaaatgtaaagtggtattttaacaatttataaatttccgactaaataatagctaaataatacagttatttgttgagtcggttaaatagaaagtgttatgatatgtgaggaatgtttaagactaggtactaaaaaatgaggggtgagacgttgaaactaaagaaagataaacgtagagaagcaatcagacaacaaattgatagcaatcccttcatcacagaccatgaactaagcgacttatttcaagtgagtatacaaacaattcgtttagatcgcacttatttaaacataccagaattaaggaagcgtattaaattagttgctgaaaagaattatgaccaaataagttctattgaagaacaagaatttattggtgatttgattcaagtcaatccaaatgttaaagcgcaatcaattttagatattacatcggattctgtttttcataaaactggaattgcgcgtggtcatgtgctgtttgctcaggcaaattcgttatgtgttgcgctaattaagcaaccaacagttttaactcatgagagtagcattcaatttattgaaaaagtaaaattaaatgatacggtaagagcagaagcacgagttgtaaatcaaactgcaaaacattattacgtcgaagtaaagtcatatgttaaacatacattagttttcaaaggaaattttaaaatgttttatgataagcgaggataaaattatggttaaattagcaattgatatgatgggtggcgacaatgcgcctgatatcgtattagaagccgtacaaaaggctgttgaagactttaaaaatctagaaattatgcttttcggtgacgaaaaaaagtataatctgaaccatgaacgaatcgaatttagacattgttctgaaaagattgaaatggaagatgagcctgttagagcgattaaacgtaaaaaagatagctcaatggtaaaaatggctgaagctgtgaaatctggtgaagcagatggatgtgtgtcagcaggtaatactggtgctttaatgtcagttggtttattcattgttggacgtattaaaggtgtagctagaccggctttagtagtaacattgccaacgattgatggaaaaggttttgtctttttagacgttggtgcaaatgctgatgctaaacctgaacacttattacagtatgcgcaactaggggatatttatgctcaaaaaattagaggtattgataatccgaaaatctcattattaaatataggtaccgagccagctaaaggtaatagtttaacgaaaaaatcatttgagttattaaatcaagatcattcattgaattttgttgggaatattgaagcgaagacattaatggatggcgatacagatgttgtagttaccgatggctatactgggaacatggtccttaaaaatttagaaggtactgcaaaatcaatcggtaaaatgttaaaagatacgattatgagtagtactaaaaataaattagcaggtgcaatattgaagaaagatttagcagaattcgctaaaaagatggattactcagaatacggtggttcagtattattaggattggaaggtactgtagttaaagcacacggtagttcaaatgctaaagctttttattctgcaattagacaagcgaaaatcgcaggagaacaaaatattgtacaaacaatgaaagagactgtaggtgaatcaaatgagtaaaacagcaattatttttccgggacaaggtgcccaaaaagttggtatggcacaagatttgtttaataacaatgatcaagcaactgaaattttaacttcagcagcaaagacgttagactttgatattttagagacaatgtttactgatgaagaaggtaaattgggtgaaactgaaaacacgcaaccagctttattgacgcatagttcggcattattagcagcgctaaaaaatttgaatcctgattttactatggggcatagtttaggtgaatattcaagtttagttgcagctgacgtattatcatttgaagatgcagttaaaattgttagaaaacgtggtcaattaatggcgcaagcatttcctactggtgtaggaagcatggctgcagtattgggattagattttgataaagtcgatgaaatttgtaagtcattatcatctgatgacaaaataattgaaccagcaaacattaattgcccaggtcaaattgttgtttcaggtcacaaagctttaattgatgagctagtagaaaaaggtaaatcattaggtgcaaaacgtgtcatgcctttagcagtatctggaccattccattcatcgctaatgaaagtgattgaagaagatttttcaagttacattaatcaatttgaatggcgtgatgctaagtttcctgtagttcaaaatgtaaatgcgcaaggtgaaactgacaaagaagtaattaaatctaatatggtcaagcaattatattcaccagtacaattcattaactcaacagaatggctaatagaccaaggtgttgatcattttattgaaattggtcctggaaaagttttatctggcttaattaaaaaaataaatagagatgttaagttaacatcaattcaaactttagaagatgtgaaaggatggaatgaaaatgactaagagtgctttagtaacaggtgcatcaagaggaattggacgtagtattgcgttacaattagcagaagaaggatataatgtagcagtaaactatgcaggcagcaaagagaaagctgaagcagtagtcgaagaaatcaaagctaaaggtgttgacagttttgcgattcaagcaaatgttgccgatgctgatgaagttaaagcaatgattaaagaagtagttagccaatttggttctttagatgttttagtaaataatgcaggtattactcgcgataatttattaatgcgtatgaaagaacaagagtgggatgatgttattgacacaaacttaaaaggtgtatttaactgtatccaaaaagcaacaccacaaatgttaagacaacgtagtggtgctatcatcaatttatcaagtgttgttggagcagtaggtaatccgggacaagcaaactatgttgcaacaaaagcaggtgttattggtttaactaaatctgcggcgcgtgaattagcatctcgtggtatcactgtaaatgcagttgcacctggttttattgtttctgatatgacagatgctttaagtgatgagcttaaagaacaaatgttgactcaaattccgttagcacgttttggtcaagacacagatattgctaatacagtagcgttcttagcatcagacaaagcaaaatatattacaggtcaaacaatccatgtaaatggtggaatgtacatgtaa

SEQ ID NO: 53 - DNA, 5473 bp, Staphylococcus aureus
ttggctaaagtaaacttaatagaaagtccatattctcttttacaattaaaaggtataggtcctaagaaaatagaagtattgcaacaactaaatattcatacagtggaagatcttgttctttatttgccaactagatatgaagataatacagtgattgatttgaatcaagcagaagatcaatctaacgttacgatagaaggacaagtatatacagctccagtagttgcattttttggaagaaataaatcaaaattaaccgttcatttaatggtaaataatattgctgtcaaatgtatttttttcaatcaaccgtatttaaaaaagaaaatcgaattaaatcaaactataactgttaaaggtaagtggaatagagttaaacaggaaattactggtaatagggttttctttaattcacaagggacacaaactcaagaaaacgcagatgttcaattagaaccagtctatcgtattaaggaaggtattaaacaaaagcaaatacgagaccaaattagacaagcgttaaatgatgtgacaattcatgaatggttaactgatgaactaagagaaaaatataaattagagaccttggactttactttgaacacattacatcatcctaaaagtaaagaggatttattacgtgctcgtagaacctatgcatttactgaactgtttttattcgaattacgtatgcaatggctaaatagattagaaaagtcatctgacgaagcaattgaaattgattatgacttagaccaagttaaatcatttattgatcgtttaccttttgaactaactgaagcacagaaatccagtgttaatgaaatttttagagatttaaaagcaccaatacgtatgcatcgattacttcaaggtgatgtaggttcaggaaaaacagtagttgctgcaatttgtatgtatgcgttaaaaacggctggttatcaatcagcattgatggtaccaactgaaattttagcagagcaacatgctgaaagtttaatggctttatttggagattctatgaacgttgcattgttaactgggtcagtaaaaggtaagaaacgaaagatacttttagaacaacttgaaaatggtacgattgattgtttaattggaacccatgctttgattcaagatgatgtgattttccataatgttggtttagtaattacagatgaacaacatcgatttggtgtgaatcaacgccagcttttaagagaaaaaggtgcaatgacgaatgtgttatttatgacagcaacgccgataccaagaacactagcaatatcagtttttggtgagatggatgtgtcttcaattaaacaattaccaaaaggtcgtaaacctatcattactacttgggcaaagcatgagcaatacgataaagttttgatgcaaatgacctcagagttgaaaaaaggtcgtcaagcatatgtcatttgcccgctaatagaaagttctgagcatctcgaagatgttcaaaatgttgtcgcattgtacgagtctttacaacagtattatggtgtttcccgtgtagggttattgcatggtaagttatctgccgatgaaaaagatgaggtcatgcaaaagtttagtaatcatgagatagatgttttagtttctactactgttgttgaagtaggtgttaatgtaccgaatgcaacttttatgatgatttatgatgcggatcgctttggattatcaactttacatcagttacgcggtcgtgtaggtagaagtgaccagcaaagttactgtgttttaattgcatcccctaaaacagaaacaggaattgaaagaatgacaattatgacacaaacaacggatggatttgaattgagtgaacgagacttagaaatgcgtggtcctggagatttctttggtgttaaacaaagtgggttgccagatttcttagttgccaatttagttgaagattatcgtatgttagaagttgctcgtgatgaagcagctgaacttattcaatctggcgtattctttgaaaatacgtatcaacatttacgtcattttgttgaagaaaatttattacatcgcagttttgactaattaccatgctgatttgtcaatttgagtgcaacacttcgttaattgagtgatatgacacttgaactatttaaatgtaaagtggtattttaacaatttataaatttccgactaaataatagctaaataatacagttatttgttgagtcggttaaatagaaagtgttatgatatgtgaggaatgtttaagactaggtactaaaaaatgaggggtgagacgttgaaactaaagaaagataaacgtagagaagcaatcagacaacaaattgatagcaatcccttcatcacagaccatgaactaagcgacttatttcaagtgagtatacaaacaattcgtttagatcgcacttatttaaacataccagaattaaggaagcgtattaaattagttgctgaaaagaattatgaccaaataagttctattgaagaacaagaatttattggtgatttgattcaagtcaatccaaatgttaaagcgcaatcaattttagatattacatcggattctgtttttcataaaactggaattgcgcgtggtcatgtgctgtttgctcaggcaaattcgttatgtgttgcgctaattaagcaaccaacagttttaactcatgagagtagcattcaatttattgaaaaagtaaaattaaatgatacggtaagagcagaagcacgagttgtaaatcaaactgcaaaacattattacgtcgaagtaaagtcatatgttaaacatacattagttttcaaaggaaattttaaaatgttttatgataagcgaggataaaattatggttaaattagcaattgatatgatgggtggcgacaatgcgcctgatatcgtattagaagccgtacaaaaggctgttgaagactttaaaaatctagaaattatgcttttcggtgacgaaaaaaagtataatctgaaccatgaacgaatcgaatttagacattgttctgaaaagattgaaatggaagatgagcctgttagagcgattaaacgtaaaaaagatagctcaatggtaaaaatggctgaagctgtgaaatctggtgaagcagatggatgtgtgtcagcaggtaatactggtgctttaatgtcagttggtttattcattgttggacgtattaaaggtgtagctagaccggctttagtagtaacattgccaacgattgatggaaaaggttttgtctttttagacgttggtgcaaatgctgatgctaaacctgaacacttattacagtatgcgcaactaggggatatttatgctcaaaaaattagaggtattgataatccgaaaatctcattattaaatataggtaccgagccagctaaaggtaatagtttaacgaaaaaatcatttgagttattaaatcaagatcattcattgaattttgttgggaatattgaagcgaagacattaatggatggcgatacagatgttgtagttaccgatggctatactgggaacatggtccttaaaaatttagaaggtactgcaaaatcaatcggtaaaatgttaaaagatacgattatgagtagtactaaaaataaattagcaggtgcaatattgaagaaagatttagcagaattcgctaaaaagatggattactcagaatacggtggttcagtattattaggattggaaggtactgtagttaaagcacacggtagttcaaatgctaaagctttttattctgcaattagacaagcgaaaatcgcaggagaacaaaatattgtacaaacaatgaaagagactgtaggtgaatcaaatgagtaaaacagcaattatttttccgggacaaggtgcccaaaaagttggtatggcacaagatttgtttaataacaatgatcaagcaactgaaattttaacttcagcagcaaagacgttagactttgatattttagagacaatgtttactgatgaagaaggtaaattgggtgaaactgaaaacacgcaaccagctttattgacgcatagttcggcattattagcagcgctaaaaaatttgaatcctgattttactatggggcatagtttaggtgaatattcaagtttagttgcagctgacgtattatcatttgaagatgcagttaaaattgttagaaaacgtggtcaattaatggcgcaagcatttcctactggtgtaggaagcatggctgcagtattgggattagattttgataaagtcgatgaaatttgtaagtcattatcatctgatgacaaaataattgaaccagcaaacattaattgcccaggtcaaattgttgtttcaggtcacaaagctttaattgatgagctagtagaaaaaggtaaatcattaggtgcaaaacgtgtcatgcctttagcagtatctggaccattccattcatcgctaatgaaagtgattgaagaagatttttcaagttacattaatcaatttgaatggcgtgatgctaagtttcctgtagttcaaaatgtaaatgcgcaaggtgaaactgacaaagaagtaattaaatctaatatggtcaagcaattatattcaccagtacaattcattaactcaacagaatggctaatagaccaaggtgttgatcattttattgaaattggtcctggaaaagttttatctggcttaattaaaaaaataaatagagatgttaagttaacatcaattcaaactttagaagatgtgaaaggatggaatgaaaatgactaagagtgctttagtaacaggtgcatcaagaggaattggacgtagtattgcgttacaattagcagaagaaggatataatgtagcagtaaactatgcaggcagcaaagagaaagctgaagcagtagtcgaagaaatcaaagctaaaggtgttgacagttttgcgattcaagcaaatgttgccgatgctgatgaagttaaagcaatgattaaagaagtagttagccaatttggttctttagatgttttagtaaataatgcaggtattactcgcgataatttattaatgcgtatgaaagaacaagagtgggatgatgttattgacacaaacttaaaaggtgtatttaactgtatccaaaaagcaacaccacaaatgttaagacaacgtagtggtgctatcatcaatttatcaagtgttgttggagcagtaggtaatccgggacaagcaaactatgttgcaacaaaagcaggtgttattggtttaactaaatctgcggcgcgtgaattagcatctcgtggtatcactgtaaatgcagttgcacctggttttattgtttctgatatgacagatgctttaagtgatgagcttaaagaacaaatgttgactcaaattccgttagcacgttttggtcaagacacagatattgctaatacagtagcgttcttagcatcagacaaagcaaaatatattacaggtcaaacaatccatgtaaatggtggaatgtacatgtaa

SEQ ID NO: 54 - DNA, 3195 bp, Staphylococcus aureus
ttgaaactaaagaaagataaacgtagagaagcaatcagacaacaaattgatagcaatcccttcatcacagaccatgaactaagcgacttatttcaagtgagtatacaaacaattcgtttagatcgcacttatttaaacataccagaattaaggaagcgtattaaattagttgctgaaaagaattatgaccaaataagttctattgaagaacaagaatttattggtgatttgattcaagtcaatccaaatgttaaagcgcaatcaattttagatattacatcggattctgtttttcataaaactggaattgcgcgtggtcatgtgctgtttgctcaggcaaattcgttatgtgttgcgctaattaagcaaccaacagttttaactcatgagagtagcattcaatttattgaaaaagtaaaattaaatgatacggtaagagcagaagcacgagttgtaaatcaaactgcaaaacattattacgtcgaagtaaagtcatatgttaaacatacattagttttcaaaggaaattttaaaatgttttatgataagcgaggataaaattatggttaaattagcaattgatatgatgggtggcgacaatgcgcctgatatcgtattagaagccgtacaaaaggctgttgaagactttaaaaatctagaaattatgcttttcggtgacgaaaaaaagtataatctgaaccatgaacgaatcgaatttagacattgttctgaaaagattgaaatggaagatgagcctgttagagcgattaaacgtaaaaaagatagctcaatggtaaaaatggctgaagctgtgaaatctggtgaagcagatggatgtgtgtcagcaggtaatactggtgctttaatgtcagttggtttattcattgttggacgtattaaaggtgtagctagaccggctttagtagtaacattgccaacgattgatggaaaaggttttgtctttttagacgttggtgcaaatgctgatgctaaacctgaacacttattacagtatgcgcaactaggggatatttatgctcaaaaaattagaggtattgataatccgaaaatctcattattaaatataggtaccgagccagctaaaggtaatagtttaacgaaaaaatcatttgagttattaaatcaagatcattcattgaattttgttgggaatattgaagcgaagacattaatggatggcgatacagatgttgtagttaccgatggctatactgggaacatggtccttaaaaatttagaaggtactgcaaaatcaatcggtaaaatgttaaaagatacgattatgagtagtactaaaaataaattagcaggtgcaatattgaagaaagatttagcagaattcgctaaaaagatggattactcagaatacggtggttcagtattattaggattggaaggtactgtagttaaagcacacggtagttcaaatgctaaagctttttattctgcaattagacaagcgaaaatcgcaggagaacaaaatattgtacaaacaatgaaagagactgtaggtgaatcaaatgagtaaaacagcaattatttttccgggacaaggtgcccaaaaagttggtatggcacaagatttgtttaataacaatgatcaagcaactgaaattttaacttcagcagcaaagacgttagactttgatattttagagacaatgtttactgatgaagaaggtaaattgggtgaaactgaaaacacgcaaccagctttattgacgcatagttcggcattattagcagcgctaaaaaatttgaatcctgattttactatggggcatagtttaggtgaatattcaagtttagttgcagctgacgtattatcatttgaagatgcagttaaaattgttagaaaacgtggtcaattaatggcgcaagcatttcctactggtgtaggaagcatggctgcagtattgggattagattttgataaagtcgatgaaatttgtaagtcattatcatctgatgacaaaataattgaaccagcaaacattaattgcccaggtcaaattgttgtttcaggtcacaaagctttaattgatgagctagtagaaaaaggtaaatcattaggtgcaaaacgtgtcatgcctttagcagtatctggaccattccattcatcgctaatgaaagtgattgaagaagatttttcaagttacattaatcaatttgaatggcgtgatgctaagtttcctgtagttcaaaatgtaaatgcgcaaggtgaaactgacaaagaagtaattaaatctaatatggtcaagcaattatattcaccagtacaattcattaactcaacagaatggctaatagaccaaggtgttgatcattttattgaaattggtcctggaaaagttttatctggcttaattaaaaaaataaatagagatgttaagttaacatcaattcaaactttagaagatgtgaaaggatggaatgaaaatgactaagagtgctttagtaacaggtgcatcaagaggaattggacgtagtattgcgttacaattagcagaagaaggatataatgtagcagtaaactatgcaggcagcaaagagaaagctgaagcagtagtcgaagaaatcaaagctaaaggtgttgacagttttgcgattcaagcaaatgttgccgatgctgatgaagttaaagcaatgattaaagaagtagttagccaatttggttctttagatgttttagtaaataatgcaggtattactcgcgataatttattaatgcgtatgaaagaacaagagtgggatgatgttattgacacaaacttaaaaggtgtatttaactgtatccaaaaagcaacaccacaaatgttaagacaacgtagtggtgctatcatcaatttatcaagtgttgttggagcagtaggtaatccgggacaagcaaactatgttgcaacaaaagcaggtgttattggtttaactaaatctgcggcgcgtgaattagcatctcgtggtatcactgtaaatgcagttgcacctggttttattgtttctgatatgacagatgctttaagtgatgagcttaaagaacaaatgttgactcaaattccgttagcacgttttggtcaagacacagatattgctaatacagtagcgttcttagcatcagacaaagcaaaatatattacaggtcaaacaatccatgtaaatggtggaatgtacatgtaa

SEQ ID NO: 55 - DNA, 7756 bp, Staphylococcus aureus
gtggaaaatttcgataaagtaaaagatatcatcgttgaccgtttaggtgtagacgctgataaagtaactgaagatgcatctttcaaagatgatttaggcgctgactcacttgatatcgctgaattagtaatggaattagaagacgagtttggtactgaaattcctgatgaagaagctgaaaaaatcaacactgttggtgatgctgttaaatttattaacagtcttgaaaaataataaatcttacatctgggtcgtcagtattgtcgactcagtttttttctttaattatcaatagttttaacgtaaaattaaagatgattcaagagcaacacataaaggagataaaataatgtctaaacaaaagaaaagtgagatagttaatcgttttagaaagcgctttgatactaaaatgacagagttaggctttacttatcaaaatattgatttataccaacaagcattttcgcattcgagttttattaatgattttaatatgaatcgtttagaccataatgagcgtttagagtttttgggtgatgcggtattagaattgacggtttcacgatatttatttgataaacatcccaacttgccagaagggaatttaacaaaaatgcgtgccactattgtatgtgagccctcacttgtaatatttgcgaataaaattggattgaacgaaatgattttacttggtaaaggtgaagagaaaacagggggacgtacaagaccatcattaatatcagatgcattcgaagcatttattggggcattgtatttggatcaaggactagatatagtttggaaatttgctgagaaagttattttcccacatgtagaacaaaatgagttattaggcgtggtagattttaaaacacaattccaagaatatgtgcaccagcaaaataaaggtgatgtaacctataatttaataaaagaagagggaccggcacatcatcgtctattcacttcagaagttattctgcaaggggaagcaatagctgaaggtaaagggaaaacgaaaaaagaatcagaacaacgtgctgctaaaagtgcctataagcaattaaaacaaattaaatagaaatttatatgatacgacatataggtgttcgatttaggatttaaggaagaatttttaatattttatggaacaacttcgaaatttaatatacaaatattaaaatatcgtatacatgtgttctttaaaattgtgataaggagtttaggatggtttatttaaaatcaatagatgccattggatttaagtcttttgcagatcaaaccaatgttcaattcgataaaggtgtaactgcaattgttggtccaaatggaagcggtaaaagtaatattacagatgctattaaatgggtgttgggtgaacaatcggctaaatcattacgtggctcaaaaatggaagatattatcttctcaggtgcagaacatcgcaaagctcaaaattatgctgaagtacagttaagattagataatcattctaaaaagctcagtgttgatgaaaacgaagttattgtaacaagaagattgtatcgaagtggtgaaagtgagtactacataaataatgaccgtgcaagattaaaagatattgccgatttatttttagattctggattgggaaaagaagcgtatagcattatctcgcaaggtagagttgatgaaatactaaatgctaaaccaattgatagacgtcaaattattgaagaatcggctggtgtacttaaatataaaaaacgtaaggctgaatcattaaataaacttgaccaaacagaagataatttaacgagagtagaagacattttatatgatttggaaggtcgcgtagaacctctaaaagaggaggcagctatagctaaagaatataagacactttcacatcaaatgaaacatagtgacattgtagttacagtgcacgatattgatcaatatacaaatgacaatagacaattagatcaacgtttaaatgatttacaaggtcaacaagcaaataaagaagctgacaagcaacgtttaagccaacaaattcaacaatataaaggtaaacgacatcaacttgataacgatgttgaatcgcttaattatcaattagtaaaagctacggaagcctttgaaaaatatacgggacaattaaatgttttagaagaacgtaagaaaaatcaatctgaaacaaatgcacgatatgaagaagaacaagaaaatttaatggagcttttagaaaatatatcaaatgagatttctgaagctcaagatacttataagtctctgaaaagtaaacaaaaagaactcaatgctgtcattcgtgaacttgaagaacaactatatgtttcagacgaagcacatgatgaaaaattggaagaaattaaaaacgaatactatacattaatgtcagagcaatcagatgttaacaatgatattcgttttttaaagcatactatagaagagaatgaggctaaaaaatcaagactagattctcgattagttgaagtttttgagcaattgaaagatattcagggtcaaataaaaacgacaaaaaaagaatatcaacagaccaacaaagaactttctgctgtagataaagaaattaaaaatatagaaaaagatctcactgatacaaaaaaagcacaaaatgaatacgaagagaaattgtatcaagcatatcgatataccgaaaaaatgaaaacacgtattgatagtttggcaacgcaagaggaagaatacacttattttttcaatggcgtcaaacatattttgaaagctaaaaataaagaattaaagggtattcatggtgcagttgcggaaattattgatgtgccatctaaattaactcaggcaattgaaacagcattaggtgcttcattacaacatgtcattgtagattcagaaaaagatggacgccaggctattcaatttttaaaagaacgtaatttaggtcgtgcgacgtttttaccattaaatgttatacagagtagagtggtagcgactgatattaaatctattgctaaagaggcaaacggatttattagtattgcttcggaagcagtgaaagtagcaccagaatatcaaaatattatcgggaatttattaggtaatacgattatcgttgatcatttaaagcatgcaaatgaattggcacgtgcgattaaatatcgaactcgtattgttactttggaaggtgatattgtaaaccctggtggttctatgactggtggtggcgctcgtaagtccaaaagtattctgtctcaaaaagacgagttgacaacaatgagacaccaattagaagattacttgcgtcaaacagaatcatttgaacaacaatttaaagagttgaagataaaaagtgatcaattaagtgaactgtattttgaaaaaagtcaaaagcataatacacttaaagagcaagtgcatcattttgaaatggagctcgatagattaactacacaagaaacacaaataaaaaatgatcatgaagaattcgaatttgaaaaaaatgatggttatacgagtgacaaaagtcgacaaactttgagtgaaaaagaaactcatttagaaagtattaaagcatctttaaaacgactagaagatgaaattgaacgctacacaaaactttctaaagaaggtaaggaaagcgtaactaaaacacaacaaacgttacatcagaaacaatctgatcttgctgtggttaaagagcgtattaaaacacaacaacagacaatagatcgattaaataatcaaagtcaacaaactaaacatcaattaaaagatgttaaagaaaaaattgcattctttaattcggatgaagtgatgggcgaacaagcttttcaaaatattaaagatcaaattaatggtcaacaagaaacgagaacacgcttatctgatgaattagataaattgaaacaacaacgtattgagttgaatgaacaaatcgatgcgcaggaagctacactacaagtttgtcaccaagatattttagctatcgaaaatcactaccaagatattaaagctgaacaatcaaagttagatgtattaattcatcatgcgatagatcatttaaatgatgaatatcaattgactgttgaacgtgcgaaatctgaatatacgagtgatgaatcgattgacgcattacgtaaaaaagttaagttaatgaagatgtcgattgatgaactaggtcctgtaaacttaaatgcaattgaacaatttgaagagttaaatgaacgttatacatttttaagtgaacaacgtacagatcttcgtaaagctaaagaaacattagagcaaattataagtgaaatggatcaagaggttactgaaagatttaaagaaactttccatgctattcaaggacattttacagctgtgttcaaacaattgtttggtggaggcgatgcagaattgcaattaactgaagccgattatttaacagctggtattgatattgtggtacaaccaccgggtaaaaagttgcaacatttatcgttactgagtggtggtgagcgtgcattaactgctattgctttactatttgcaattttaaaagtaagatctgcaccttttgttatattagatgaggttgaagctgcactagatgaagcaaatgttattagatacgcaaaatatttaaatgagttatcagacgaaacacaattcattgttattacacaccgtaaaggaacaatggaatttgcagataggttatacggtgtaacaatgcaagaatcaggtgttactaaacttgtgagtgtgaatttaaatacaatagatgatgtgttgaaggaggagcaataatgagcttttttaaacgcttaaaagataagtttgcaacaaataaagaaaatgaagaagttaaatccttaagagaagaacaaggtcaagacaaattagaagatacacattctgaaggttcaacgcaggacgtaaatgatttagcagaaaatgctgaagtgaaaaagaagccacgcaagttgagtgaagcggattttgatgacgatggcttaatatcaattgaagattttgaagaaattgaagctcaaaaaatgggtgctaaatttaaagcaggactcgaaaaatctcgtcaaaatttccaagaacaattaaataatttgatagcgagatatcgtaaagtagatgaagacttttttgaagctttagaagaaatgttaatcactgcagacgtcggttttaatacagtgatgacgttaactgaagaattacgtatggaagcacaacgacgtaatattcaagatactgaagatttgcgtgaagtcattgttgaaaaaatcgtagagatttaccatcaagaagatgataattcagaagctatgaacatagaagatggtcgtttaaatgtcattttaatggtcggtgtgaatggtgttggtaaaacaacaacaattggaaaattagcttaccgatataaaatggaaggtaaaaaagtaatgttagctgcgggcgatacttttagagcgggtgctattgatcaattgaaagtttggggcgaacgtgttggtgtagatgtaattagccaaagtgaaggttctgatccagctgctgttatgtatgatgcgattaatgccgctaaaaacaaaggtgttgatattttaatctgtgataccgctggacgtttacaaaataaaacaaatctaatgcaagaattagaaaaagttaagcgtgtaattaatcgagcagtgccagatgcgcctcatgaagcattactatgtttagatgctacaactggtcagaatgcgttgtcacaagctagaaactttaaagaagtaacaaatgttacaggtattgtattaacgaaattagatggtacagccaaaggtggtatcgtattagccattcgtaatgaattgcacattccagttaaatatgtaggtttaggtgagcaattagatgacttacaaccatttaaccctgaaagttatgtctacggcttattcgctgatatgattgaacaaaatgacgaaataacaacagttgaaaatgatcaaattgtaacagaagaaaaggacgataatcatggggcaaaatgatttagttaaaacgttacgaatgaattatttgtttgatttttatcaatccttattgacgaataaacaacgtaattatttggaattattttatctcgaagattattctttaagtgaaatcgcagatacttttaatgtgagtagacaagcagtttatgataatataagaagaactggcgatttagttgaagattatgaaaagaaattggaattataccagaaatttgagcaacgccgagaaatatatgatgaaatgaaacaacatttaagtaatccagaacaaatacaacgttatattcaacaattagaagacttagaatagatataaattgagggaggacatcgatatggcatttgaaggcttatcagaacgcctgcaagcgacgatgcaaaaaatgcgtggtaagggtaaacttactgaagctgatataaagataatgatgcgtgaagtaagattagcgttatttgaggctgacgtaaactttaaagtggtaaaagaatttattaaaacagtatcagaacgcgcattaggttccgatgtaatgcaatcattaacaccagggcaacaagttattaaaatagttcaagatgaattaacgaagttgatgggtggagaaaatacatcgattaatatgtcaaataaaccacctactgttgttatgatggttggtttacaaggtgctggtaaaacaacaactgcaggtaaattagcattattgatgcgtaaaaaatacaacaaaaaacctatgttagttgcagcagatatttatcgtccagcagcgataaatcaattacaaacagtagggaaacaaattgatattcctgtatacagtgaaggagatcaagtaaagccacaacaaattgtaactaatgcattaaaacatgctaaagaagaacatttagactttgtaatcattgatacagcaggtcgattacacatcgatgaagcattgatgaacgaattaaaagaagtaaaagaaattgctaaaccaaacgaaattatgttagttgtcgattcaatgacgggtcaagatgctgtcaatgttgcagaatcttttgacgatcaacttgatgtcacaggtgttaccttaactaaattagatggtgatacacgtggtggtgcagctttatctattcgttcggtgacacaaaaaccaattaaatttgttggtatgagtgaaaagttagatggtttagagctattccatcctgaacgtatggcatcacgtattttaggtatgggtgatgtgttaagtttaattgaaaaagcgcaacaagatgtggatcaagaaaaagcaaaagatttagagaaaaagatgcgtgagtcatcgtttactttagatgattttttagaacaacttgatcaggtgaaaaatctaggaccactggatgatattatgaaaatgattccaggtatgaataaaatgaaagggctagataagcttaatatgagtgaaaagcaaattgatcatattaaagcgattatccagtcaatgacgccggctgaaagaaacaatccagacacattgaatgtatcacgtaaaaagcgtattgctaaagggtctggtcgttcattacaagaagtcaatcgtttgatgaaacaatttaacgatatgaagaaaatgatgaaacaattcactggtggcggtaaaggtaaaaaaggtaaacgcaatcaaatgcaaaatatgttaaaaggtatgaatttaccgttttaa

SEQ ID NO: 56 - DNA, 234 bp, Staphylococcus aureus
gtggaaaatttcgataaagtaaaagatatcatcgttgaccgtttaggtgtagacgctgataaagtaactgaagatgcatctttcaaagatgatttaggcgctgactcacttgatatcgctgaattagtaatggaattagaagacgagtttggtactgaaattcctgatgaagaagctgaaaaaatcaacactgttggtgatgctgttaaatttattaacagtcttgaaaaataa

SEQ ID NO: 57 - DNA, 7407 bp, Staphylococcus aureus
atgtctaaacaaaagaaaagtgagatagttaatcgttttagaaagcgctttgatactaaaatgacagagttaggctttacttatcaaaatattgatttataccaacaagcattttcgcattcgagttttattaatgattttaatatgaatcgtttagaccataatgagcgtttagagtttttgggtgatgcggtattagaattgacggtttcacgatatttatttgataaacatcccaacttgccagaagggaatttaacaaaaatgcgtgccactattgtatgtgagccctcacttgtaatatttgcgaataaaattggattgaacgaaatgattttacttggtaaaggtgaagagaaaacagggggacgtacaagaccatcattaatatcagatgcattcgaagcatttattggggcattgtatttggatcaaggactagatatagtttggaaatttgctgagaaagttattttcccacatgtagaacaaaatgagttattaggcgtggtagattttaaaacacaattccaagaatatgtgcaccagcaaaataaaggtgatgtaacctataatttaataaaagaagagggaccggcacatcatcgtctattcacttcagaagttattctgcaaggggaagcaatagctgaaggtaaagggaaaacgaaaaaagaatcagaacaacgtgctgctaaaagtgcctataagcaattaaaacaaattaaatagaaatttatatgatacgacatataggtgttcgatttaggatttaaggaagaatttttaatattttatggaacaacttcgaaatttaatatacaaatattaaaatatcgtatacatgtgttctttaaaattgtgataaggagtttaggatggtttatttaaaatcaatagatgccattggatttaagtcttttgcagatcaaaccaatgttcaattcgataaaggtgtaactgcaattgttggtccaaatggaagcggtaaaagtaatattacagatgctattaaatgggtgttgggtgaacaatcggctaaatcattacgtggctcaaaaatggaagatattatcttctcaggtgcagaacatcgcaaagctcaaaattatgctgaagtacagttaagattagataatcattctaaaaagctcagtgttgatgaaaacgaagttattgtaacaagaagattgtatcgaagtggtgaaagtgagtactacataaataatgaccgtgcaagattaaaagatattgccgatttatttttagattctggattgggaaaagaagcgtatagcattatctcgcaaggtagagttgatgaaatactaaatgctaaaccaattgatagacgtcaaattattgaagaatcggctggtgtacttaaatataaaaaacgtaaggctgaatcattaaataaacttgaccaaacagaagataatttaacgagagtagaagacattttatatgatttggaaggtcgcgtagaacctctaaaagaggaggcagctatagctaaagaatataagacactttcacatcaaatgaaacatagtgacattgtagttacagtgcacgatattgatcaatatacaaatgacaatagacaattagatcaacgtttaaatgatttacaaggtcaacaagcaaataaagaagctgacaagcaacgtttaagccaacaaattcaacaatataaaggtaaacgacatcaacttgataacgatgttgaatcgcttaattatcaattagtaaaagctacggaagcctttgaaaaatatacgggacaattaaatgttttagaagaacgtaagaaaaatcaatctgaaacaaatgcacgatatgaagaagaacaagaaaatttaatggagcttttagaaaatatatcaaatgagatttctgaagctcaagatacttataagtctctgaaaagtaaacaaaaagaactcaatgctgtcattcgtgaacttgaagaacaactatatgtttcagacgaagcacatgatgaaaaattggaagaaattaaaaacgaatactatacattaatgtcagagcaatcagatgttaacaatgatattcgttttttaaagcatactatagaagagaatgaggctaaaaaatcaagactagattctcgattagttgaagtttttgagcaattgaaagatattcagggtcaaataaaaacgacaaaaaaagaatatcaacagaccaacaaagaactttctgctgtagataaagaaattaaaaatatagaaaaagatctcactgatacaaaaaaagcacaaaatgaatacgaagagaaattgtatcaagcatatcgatataccgaaaaaatgaaaacacgtattgatagtttggcaacgcaagaggaagaatacacttattttttcaatggcgtcaaacatattttgaaagctaaaaataaagaattaaagggtattcatggtgcagttgcggaaattattgatgtgccatctaaattaactcaggcaattgaaacagcattaggtgcttcattacaacatgtcattgtagattcagaaaaagatggacgccaggctattcaatttttaaaagaacgtaatttaggtcgtgcgacgtttttaccattaaatgttatacagagtagagtggtagcgactgatattaaatctattgctaaagaggcaaacggatttattagtattgcttcggaagcagtgaaagtagcaccagaatatcaaaatattatcgggaatttattaggtaatacgattatcgttgatcatttaaagcatgcaaatgaattggcacgtgcgattaaatatcgaactcgtattgttactttggaaggtgatattgtaaaccctggtggttctatgactggtggtggcgctcgtaagtccaaaagtattctgtctcaaaaagacgagttgacaacaatgagacaccaattagaagattacttgcgtcaaacagaatcatttgaacaacaatttaaagagttgaagataaaaagtgatcaattaagtgaactgtattttgaaaaaagtcaaaagcataatacacttaaagagcaagtgcatcattttgaaatggagctcgatagattaactacacaagaaacacaaataaaaaatgatcatgaagaattcgaatttgaaaaaaatgatggttatacgagtgacaaaagtcgacaaactttgagtgaaaaagaaactcatttagaaagtattaaagcatctttaaaacgactagaagatgaaattgaacgctacacaaaactttctaaagaaggtaaggaaagcgtaactaaaacacaacaaacgttacatcagaaacaatctgatcttgctgtggttaaagagcgtattaaaacacaacaacagacaatagatcgattaaataatcaaagtcaacaaactaaacatcaattaaaagatgttaaagaaaaaattgcattctttaattcggatgaagtgatgggcgaacaagcttttcaaaatattaaagatcaaattaatggtcaacaagaaacgagaacacgcttatctgatgaattagataaattgaaacaacaacgtattgagttgaatgaacaaatcgatgcgcaggaagctacactacaagtttgtcaccaagatattttagctatcgaaaatcactaccaagatattaaagctgaacaatcaaagttagatgtattaattcatcatgcgatagatcatttaaatgatgaatatcaattgactgttgaacgtgcgaaatctgaatatacgagtgatgaatcgattgacgcattacgtaaaaaagttaagttaatgaagatgtcgattgatgaactaggtcctgtaaacttaaatgcaattgaacaatttgaagagttaaatgaacgttatacatttttaagtgaacaacgtacagatcttcgtaaagctaaagaaacattagagcaaattataagtgaaatggatcaagaggttactgaaagatttaaagaaactttccatgctattcaaggacattttacagctgtgttcaaacaattgtttggtggaggcgatgcagaattgcaattaactgaagccgattatttaacagctggtattgatattgtggtacaaccaccgggtaaaaagttgcaacatttatcgttactgagtggtggtgagcgtgcattaactgctattgctttactatttgcaattttaaaagtaagatctgcaccttttgttatattagatgaggttgaagctgcactagatgaagcaaatgttattagatacgcaaaatatttaaatgagttatcagacgaaacacaattcattgttattacacaccgtaaaggaacaatggaatttgcagataggttatacggtgtaacaatgcaagaatcaggtgttactaaacttgtgagtgtgaatttaaatacaatagatgatgtgttgaaggaggagcaataatgagcttttttaaacgcttaaaagataagtttgcaacaaataaagaaaatgaagaagttaaatccttaagagaagaacaaggtcaagacaaattagaagatacacattctgaaggttcaacgcaggacgtaaatgatttagcagaaaatgctgaagtgaaaaagaagccacgcaagttgagtgaagcggattttgatgacgatggcttaatatcaattgaagattttgaagaaattgaagctcaaaaaatgggtgctaaatttaaagcaggactcgaaaaatctcgtcaaaatttccaagaacaattaaataatttgatagcgagatatcgtaaagtagatgaagacttttttgaagctttagaagaaatgttaatcactgcagacgtcggttttaatacagtgatgacgttaactgaagaattacgtatggaagcacaacgacgtaatattcaagatactgaagatttgcgtgaagtcattgttgaaaaaatcgtagagatttaccatcaagaagatgataattcagaagctatgaacatagaagatggtcgtttaaatgtcattttaatggtcggtgtgaatggtgttggtaaaacaacaacaattggaaaattagcttaccgatataaaatggaaggtaaaaaagtaatgttagctgcgggcgatacttttagagcgggtgctattgatcaattgaaagtttggggcgaacgtgttggtgtagatgtaattagccaaagtgaaggttctgatccagctgctgttatgtatgatgcgattaatgccgctaaaaacaaaggtgttgatattttaatctgtgataccgctggacgtttacaaaataaaacaaatctaatgcaagaattagaaaaagttaagcgtgtaattaatcgagcagtgccagatgcgcctcatgaagcattactatgtttagatgctacaactggtcagaatgcgttgtcacaagctagaaactttaaagaagtaacaaatgttacaggtattgtattaacgaaattagatggtacagccaaaggtggtatcgtattagccattcgtaatgaattgcacattccagttaaatatgtaggtttaggtgagcaattagatgacttacaaccatttaaccctgaaagttatgtctacggcttattcgctgatatgattgaacaaaatgacgaaataacaacagttgaaaatgatcaaattgtaacagaagaaaaggacgataatcatggggcaaaatgatttagttaaaacgttacgaatgaattatttgtttgatttttatcaatccttattgacgaataaacaacgtaattatttggaattattttatctcgaagattattctttaagtgaaatcgcagatacttttaatgtgagtagacaagcagtttatgataatataagaagaactggcgatttagttgaagattatgaaaagaaattggaattataccagaaatttgagcaacgccgagaaatatatgatgaaatgaaacaacatttaagtaatccagaacaaatacaacgttatattcaacaattagaagacttagaatagatataaattgagggaggacatcgatatggcatttgaaggcttatcagaacgcctgcaagcgacgatgcaaaaaatgcgtggtaagggtaaacttactgaagctgatataaagataatgatgcgtgaagtaagattagcgttatttgaggctgacgtaaactttaaagtggtaaaagaatttattaaaacagtatcagaacgcgcattaggttccgatgtaatgcaatcattaacaccagggcaacaagttattaaaatagttcaagatgaattaacgaagttgatgggtggagaaaatacatcgattaatatgtcaaataaaccacctactgttgttatgatggttggtttacaaggtgctggtaaaacaacaactgcaggtaaattagcattattgatgcgtaaaaaatacaacaaaaaacctatgttagttgcagcagatatttatcgtccagcagcgataaatcaattacaaacagtagggaaacaaattgatattcctgtatacagtgaaggagatcaagtaaagccacaacaaattgtaactaatgcattaaaacatgctaaagaagaacatttagactttgtaatcattgatacagcaggtcgattacacatcgatgaagcattgatgaacgaattaaaagaagtaaaagaaattgctaaaccaaacgaaattatgttagttgtcgattcaatgacgggtcaagatgctgtcaatgttgcagaatcttttgacgatcaacttgatgtcacaggtgttaccttaactaaattagatggtgatacacgtggtggtgcagctttatctattcgttcggtgacacaaaaaccaattaaatttgttggtatgagtgaaaagttagatggtttagagctattccatcctgaacgtatggcatcacgtattttaggtatgggtgatgtgttaagtttaattgaaaaagcgcaacaagatgtggatcaagaaaaagcaaaagatttagagaaaaagatgcgtgagtcatcgtttactttagatgattttttagaacaacttgatcaggtgaaaaatctaggaccactggatgatattatgaaaatgattccaggtatgaataaaatgaaagggctagataagcttaatatgagtgaaaagcaaattgatcatattaaagcgattatccagtcaatgacgccggctgaaagaaacaatccagacacattgaatgtatcacgtaaaaagcgtattgctaaagggtctggtcgttcattacaagaagtcaatcgtttgatgaaacaatttaacgatatgaagaaaatgatgaaacaattcactggtggcggtaaaggtaaaaaaggtaaacgcaatcaaatgcaaaatatgttaaaaggtatgaatttaccgttttaa

SEQ ID NO: 58 - DNA, 2158 bp, Staphylococcus aureus
atggcagttaaaattcgtttaacacgtttaggttcaaaaagaaatccattctatcgtatcgtagtagcagatgctcgttctccacgtgacggacgtatcatcgaacaaatcggtacttataacccaacgagcgctaatgctccagaaattaaagttgacgaagcgttagctttaaaatggttaaatgatggtgcgaaaccaactgatacagttcacaatatcttatcaaaagaaggtattatgaaaaaatttgacgaacaaaagaaagctaagtaatttagcgtaaaattgttctaacaataagaataactcgtttacactgacagttattactcaatgatacgttgggaatatcacatgttagtaatatagaacgtattgggtaccataatggtgccctttttctttgaattattttcaattaaaatagaagtgttcaaagcatagagttggaggtaatagaatgagagttgaagttggtcaaattgttaacacacatggtattaaaggtgaaattaaagtaaaatccaattcagactttacagacgttcgttttcaacccggtcaagtgctgacagttgtgcataacaataacgaccttgaatatactgttaagtcacatagagtgcataaagggcttcatatgcttacatttgaaggtattaataatattaatgatattgagcatttaaaagggagttctatttatcaagagcgtgatcatgaagatatcgtacttgaggaaaatgaattttattattcagatattataggatgtacagtttttgatgatcaagaaacaccaataggtcgtgtaattaatatatttgaaacaggtgcgaatgatgtgtgggtgattaaaggatctaaagaatatttgattccttatattgctgatgttgtaaaagaagtggatgttgaaaataaaaaaattatcatcacgccaatggaaggattgttggattaatgaaaattgattatttaactttatttcctgaaatgtttgatggtgttttaaatcattcaattatgaaacgtgcccaagaaaacaataaattacaaatcaatacggttaattttagagattatgcaattaacaagcacaaccaagtagatgattatccgtatggtggcggacaaggtatggtgttaaagcctgaacctgtttttaatgcgatggaagacttagatgtcacagaacaaacacgcgttattttaatgtgtccacaaggcgagccattttcacatcagaaagctgttgaattaagcaaggctgaccacatcgttttcatatgcggacattatgaaggttacgatgaacgtatccgaacacatcttgtcacagatgaaatatcaatgggtgactatgtgttaactggcggtgagttaccggcaatgacaatgactgatgctattgttagactgattccaggtgttttaggtaatgaacagtcacatcaagacgattcattttcagatgggttattagagtttccgcaatatacacgtccgcgtgaatttaagggtctaacagttccagatgttttattgtctggaaatcatgccaatattgatgcatggagacatgagcaaaagttgatccgcacatataataaaagacctgacttaattgaaaaatatccattaactaatgaagataagcaaatattagaaagatataaaataggattgaaaaaaggttagtattgtgctaacatattctgagtgtggaaacacaaaaatcactatgatccgctgctatatactttgtcgaggcaagaacataggttgaagaggagaatttataatgacaaatcacaaattaatcgaagcagtaactaaatcacaattgcgtacagacttaccaagtttccgtcctggtgatactttacgtgtacacgtacgtatcattgagggtactcgtgagcgtatccaagtattcgaaggcattgtaattaaacgtcgtggcggtggcgtttctgaaacgtttacagttcgtaaaatttcatcaggtgttggcgtggaacgtacattcccattacacacaccaaaaattgaaaaaatcgaagttaaacgtcgtggtaaagtacgtcgtgctaaattatattacttacgtagtttacgtggtaaagctgctagaatccaagaaattcgttaa

SEQ ID NO: 59 - DNA, 1636 bp, Staphylococcus aureus
atggttattcaatggtatccaggacatatggcgaaagccaaaagagaagtaagtgaacaattaaaaaaagtagatgtagtgtttgaactagtagatgcaagaattccatatagttcaagaaaccctatgatagatgaagttattaaccaaaaaccacgtgttgttatattaaataaaaaagatatgtctaatttaaatgagatgtcaaaatgggaacaattttttattgataaaggatactatcctgtatcagtggatgctaagcacggtaaaaatttaaagaaagtggaagctgcagcaattaaggcgactgctgaaaaatttgaacgcgaaaaagcgaaaggacttaaacctagagcgataagagcaatgatcgttggaattccaaatgttggtaaatccacattaataaataaactggcaaagcgtagtattgcgcagactggtaataaaccaggtgtgaccaaacaacaacaatggattaaagttagtaatgcattacaactattagacacaccagggatactttggcctaaatttgaagatgaagaagtcggtaagaagttgagtttaactggtgcgataaaagatagtattgtgcacttagatgaagttgccatctatggattaaactttttaattcaaaatgatttagcgcgattaaagtcacattataatattgaagttcctgaagatgcagaaatcatagcgtggtttgatgcgatagggaaaaaacgtggcttaattcgacgtggtaatgaaattgattacgaagcagtcattgaactgattatttatgatattcgaaatgctaaaataggaaattattgttttgatatttttaaagatatgactgaggaattagcaaatgacgctaacaattaaagaagttacgcagttgattaatgcggttaatacaatagaagaattagaaaatcatgaatgctttttagatgagcgaaaaggtgttcaaaatgccatagctaggcgcagaaaagcgttagaaaaagaacaagctttaaaagaaaagtatgttgaaatgacttactttgaaaatgaaatattaaaagagcatcctaatgctattatttgtgggattgatgaagttggaagaggacctttagcaggtccagtcgttgcatgcgcaacaattttaaattcaaatcacaattatttgggccttgatgactcgaaaaaagtacctattacgaaacgtctagaattaaatgaagcactaaaaaatgaagttactgcttttgcatatggtatcgcgacagctgaagaaatagatgaatttaatatttataaagctactcaaatcgccatgcagcgagctattgatggattatcagtacaaccaacgcatttattgatagacgcgatgacgcttgataatgcactgcctcaagtatctttaatcaagggtgatgcaagaagtgtgtccattgcagctgcaagtatcatggcgaaggtttttcgtgatgattatatgacacagttatctaaagattatcctgaatacggttttgaaaaaaacgcgggttatggtaccaaacaacatttactagcaatcgatgatattggcattatgaaagagcatagaaaaagctttgaacctataaaatcgttactgtaa

SEQ ID NO: 60 - DNA, 3706 bp, Staphylococcus aureus
ttgaatcatattcaagaagcgtttttaaatacattgaaagttgaacggaatttttcggaacatacattgaaatcatatcaagatgacttaattcagtttaatcaatttttagaacaagaacatttacagttgaaaacttttgaatacagagatgctagaaattatttgagctatttatattcaaatcatttgaaaagaacatctgtttctcgtaaaatctcaacgttaagaactttctatgaatattggatgacgcttgatgagaacattattaatccatttgttcaattagtacatccgaaaaaagaaaaatatcttccgcaattcttttacgaagaagaaatggaagcgttattcaaaactgtagaagaggacacttcaaaaaatttacgggatcgagttattcttgaattgttgtatgctacaggcatccgtgtttcggaattagtaaatattaaaaaacaagatatagatttttacgcgaatggtgttaccgtattaggaaaagggagcaaagagcgttttgtaccgtttggtgcttattgtagacaaagcatcgaaaattatttagaacatttcaaaccaattcagtcatgcaatcatgattttcttattttaaatatgaagggtgaagcaatcactgaacgcggtgtacgatatgttttaaatgatattgttaaacgaacagcaggcgtaagtgagattcatccccacaagctcagacatacatttgcaacgcatttattgaatcaaggtgcagacctaagaacagtacaatcgttattaggtcatgttaatttgtcaacaactggtaaatatacacacgtatctaaccaacaattaagaaaagtgtatctaaatgcacatcctcgagcgaaaaaggagaatgaaacatgagtaatacaacattacatgcaacaacaatttatgctgtaagacataatgggaaagcagctatggctggagatggacaagtaacgcttggtcaacaagtcatcatgaaacaaacggcaagaaaagtgcgacgtttatatgaaggtaaagtgttagctggtttcgcaggtagtgtagcagatgcgtttacgttatttgaaaaatttgaaacaaaattacaacagtttagtggtaacttagaaagagctgctgttgaattggcacaagaatggcgaggcgataaacaattacgtcaattagaagctatgctaattgtaatggataaagatgctattttagttgtcagtggaactggcgaagttattgccccagatgatgaccttatcgctattggatcagggggcaactacgcattaagcgcaggacgtgcattgaaacgccatgcatcgcatttgtctgctgaagaaatggcatatgagagcttgaaagtagcggctgatatttgtgtctttaccaacgataatattgttgttgaaacactataataatcagagcacgataaataattacgaccaattaattttagttaaaagacggaggaatgaaattaatggatacagctggaataagattaactccaaaagaaatcgtatctaaattaaatgaatatatcgttggacaaaatgatgctaaacgtaaagtggcaattgccctacgtaatcgatacagaagaagtttattagatgaggaatcaaagcaagaaatttcacctaaaaatattttgatgattggaccaaccggcgttggtaaaactgaaattgcaagaagaatggccaaagttgtcggcgcgccatttataaaagtagaagctactaaatttactgagctaggttatgtaggacgagatgttgaaagtatggttagagatcttgttgatgtttcagtaagattagtcaaggcgcagaaaaaatcattggtacaagatgaagcaacagctaaggccaatgaaaaacttgttaagttattagttccaagtatgaaaaagaaagcgtctcaaacgaataatcctttagagtcacttttcggaggtgcaattccaaatttcggacaaaataacgaagatgaagaagaaccacctactgaggaaattaaaacaaaacgttctgaaattaagagacagctagaagaaggcaaacttgaaaaagaaaaggtaagaattaaagtcgaacaagatcctggtgctttaggtatgctaggtacaaatcaaaatcagcaaatgcaagagatgatgaatcaattaatgcctaaaaagaaagttgagcgagaagttgctgttgagacggcaaggaaaatcttagctgatagttatgcggatgaactaattgatcaagaaagcgctaaccaagaagcgcttgaattagcagaacaaatgggtatcatctttatagatgaaatcgacaaagttgcgacgaataatcataatagtggtcaagatgtctcaagacaaggtgttcaaagagatattttacctatacttgaaggtagcgttattcaaaccaaatatggtactgtgaatactgaacatatgctgtttataggtgctggagctttccatgtatctaagccgagtgacttgataccagaattgcaaggtcgttttccgattagagttgaacttgatagtttatcggtagaagattttgtaagaattttgacagaaccaaaattgtcattaattaaacaatatgaagcattgcttcaaacagaagaagttactgtaaactttaccgatgaagcaattactcgcttagctgagattgcttatcaagtaaatcaagatacagacaacattggtgcacgtcgacttcatacaattttagaaaagatgctagaagatttatcattcgaagcaccaagtatgccgaatgcagttgtagatattaccccacaatatgttgatgataaattaaaatcaatttcaacaaataaagatttaagtgcatttattctataaaaatatacaaaaggagaaaaattcatgagcttattatctaaaacgagagagttaaacacgttacttcaaaaacacaaaggtattgcggttgattttaaagatgtagcacaaacgattagtagcgtaactgtaacaaatgtatttattgtatcgcgtcgaggtaaaattttagggtcgagtctaaatgaattattaaaaagtcaaagaattattcaaatgttggaagaaagacatattccaagtgaatatacagaacgattaatggaagttaaacaaacagaatcaaatattgatatcgacaatgtattaacagtattcccacctgaaaacagagaattattcatagatagtcgtacaactatcttcccaattttaggtggaggagaaagattaggtacattagtacttggtcgagtacatgatgattttaatgaaaatgatttggtactaggtgaatatgctgctacagttattggtatggaaatcttacgtgagaagcatagtgaagtagaaaaagaagcgcgcgataaagctgctattacaatggcaattaattcattatcttattctgaaaaagaagcgattgaacatatctttgaagaacttggcggtacggaaggcctattaatcgcatcaaaagttgcagatagagttggtattactagatctgtaattgtaaatgcactacgtaaattagaaagtgctggtgtaattgaatcacgttctttaggaatgaaaggtactttcattaaagttaaaaaagaaaaattcttagatgaattagaaaaaagtaaataa

SEQ ID NO: 61 - DNA, 3263 bp, Staphylococcus aureus
atggcagtaatttcaatgaaacaattactagaagcgggtgttcacttcggtcaccaaacacgtcgttggaacccaaaaatgaaaaaatatatcttcactgagagaaatggtatttatatcatcgacttacaaaaaacagtgaaaaaagtagacgaggcatacaacttcttgaaacaagtttcagaagatggtggacaagtcttattcgtaggaactaaaaaacaagcacaagaatcagttaaatctgaagcagaacgtgctggtcaattctacattaaccaaagatggttaggtggattattaactaactataaaacaatctcaaaacgaatcaaacgtatttctgaaattgaaaaaatggaagaagatggtttattcgaagtattacctaaaaaagaagtagtagaacttaaaaaagaatacgaccgtttaatcaaattcttaggcggaattcgtgatatgaaatcaatgcctcaagcattattcgtagttgacccacgtaaagagcgtaatgcaattgctgaagctcgtaaattaaatattcctatcgtaggtatcgttgacactaactgtgatcctgacgaaattgactacgttatcccagcaaacgacgatgctatccgtgcggttaaattattaactgctaaaatggcagatgcaatcttagaaggtcaacaaggcgtttctaatgaagaagtagctgcagaacaaaacatcgatttagatgaaaaagaaaaatcagaagaaacagaagcaactgaagaataatcaactgttgaatctgacttagatatagtttaaatgggtgataagatattaatgcttatcaccttttttaaaaagaaaatcgaggcaaattacaaatattcaattagagtattggcaatcttgcctataataatgctaaaatcataatatataaaatgataacttattggaggaataatgaatggcaactatttcagcaaaacttgttaaagaattacgtaaaaaaactggcgcgggtatgatggattgtaaaaaagcgctaactgaaactgatggtgacatcgataaagcgattgattacctacgtgaaaaaggtattgctaaagcagctaaaaaagcagaccgtattgcggctgaaggtttagtacatgtagaaactaaaggtaacgacgcagttatcgttgaaatcaactctgaaacagactttgttgctcgtaacgaaggattccaagagttagttaaagaaatcgctaatcaagtattagatacaaaagctgaaactgttgaagctttaatggaaacaactttaccaaatggtaaatcagttgatgaaagaattaaagaagcaatttcaacaatcggtgaaaaattaagtgttcgtcgttttgctatcagaactaaaactgataacgatgctttcggcgcttacttacacatgggtggacgcattggtgtattaacagttgttgaaggttcaactgacgaagaagcagcaagagacgttgctatgcatatcgctgcaatcaaccctaaatatgtttcttctgaacaagttagcgaagaagaaatcaaccacgaaagagaagttttaaaacaacaagcattaaatgaaggtaaaccagaaaacatcgttgaaaaaatggtggaaggacgtttacgtaaatacttacaagaaatttgtgctgtagatcaagacttcgttaaaaaccctgatgtaacagttgaagctttcttaaaaacaaaaggtggaaaacttgttgacttcgtacgctatgaagtaggcgaaggtatggaaaaacgcgaagaaaactttgcggatgaagttaaaggacaaatgaaataatctgtcataaagtaaaacaaggaagaagacacctttaatgttgctttattaaaatgtaaatcattctaataaaacgacaactgtgtcttctttacttgtatatgttacatatattcacgatagagaggataagaaaatggctcaaatttctaaatataaacgtgtagttttgaaactaagtggtgaagcgttagctggagaaaaaggatttggcataaatccagtaattattaaaagtgttgctgagcaagtggctgaagttgctaaaatggactgtgaaatcgcagtaatcgttggtggcggaaacatttggagaggtaaaacaggtagtgacttaggtatggaccgtggaactgctgattacatgggtatgcttgcaactgtaatgaatgccttagcattacaagatagtttagaacaattggattgtgatacacgagtattaacatctattgaaatgaagcaagtggctgaaccttatattcgtcgtcgtgcaattagacacttagaaaagaaacgcgtagttatttttgctgcaggtattggaaacccatacttctctacagatactacagcggcattacgtgctgcagaagttgaagcagatgttattttaatgggcaaaaataatgtagatggtgtatattctgcagatcctaaagtaaacaaagatgcggtaaaatatgaacatttaacgcatattcaaatgcttcaagaaggtttacaagtaatggattcaacagcatcctcattctgtatggataataacattccgttaactgttttctctattatggaagaagggaatattaaacgtgctgttatgggtgaaaagataggtacgttaattacaaaataaatttagaggtgtaaaataatgagtgacattattaatgaaactaaatcaagaatgcaaaaatcaatcgaaagcttatcacgtgaattagctaatatcagtgcaggaagagctaattcaaatttattaaacggcgtaacagttgattactatggtgcaccaacacctgtacaacaattagcaagcatcaatgttccagaagcacgtttacttgttatttctccatacgacaaaacttctgtagctgacatcgaaaaagcgataatagcggctaacttaggtgtcaacccaacaagtgatggtgaagtgatacgtattgcagtacctgccttaacagaagagcgtagaaaagagcgcgttaaagatgttaagaaaattggtgaagaagctaaagtatctgttcgaaatattcgtcgtgatatgaatgatcagttgaaaaaagatgaaaaaaatggcgacattactgaagatgagttgagaagtggtactgaagatgttcagaaagcaacagacaattcaataaaagaaattgatcaaatgattgctgataaagaaaaagatattatgtcagtataa

SEQ ID NO: 62 - DNA, 14049 bp, Staphylococcus aureus
atgtttaaaaagctaataaataaaaagaacactataaataattataatgaagaattagactcgtctaatatacctgaacatatcgctattattatggatggtaatgggcgatgggctaagaagcgaaaaatgcctagaattaaaggccattacgaaggtatgcaaacaataaaaaaaattactaggatagctagtgatattggtgttaagtacttaactttatatgccttttccactgaaaattggtcaagacctgaaagtgaagtaaattatattatgaatttgcctgtcaatttcttaaagacattcttaccggaactaattgaaaaaaatgtcaaagttgaaacaattggatttactgataagttgccaaaatcaacgatagaagcaattaataatgctaaagaaaagacagctaataataccggcttaaaattaatatttgcaattaattatggtggcagagcagaacttgttcatagtattaaaaatatgtttgacgagcttcatcaacaaggtttaaatagtgatatcatagatgaaacatatataaacaatcatttaatgacaaaagactatcctgatccagagttgttaattcgtacttcaggagaacaaagaataagtaatttcttgatttggcaagtttcgtatagtgaatttatctttaatcaaaaattatggcctgactttgacgaagatgaattaattaaatgtataaaaatttatcagtcacgtcaaagacgctttggcggattgagtgaggagtagtatagtatgaaagttagaacgctgacagctattattgccttaatcgtattcttgcctatcttgttaaaaggcggccttgtgttaatgatatttgctaatatattagcattgattgcattaaaagaattgttgaatatgaatatgattaaatttgtttcagttcctggtttaattagtgcagttggtcttatcatcattatgttgccacaacatgcagggccatgggtacaagtaattcaattaaaaagtttaattgcaatgagctttattgtattaagttatactgtcttatctaaaaacagatttagttttatggatgctgcattttgcttaatgtctgtggcttatgtaggcattggttttatgttcttttatgaaacgagatcagaaggattacattacatattatatgcctttttaattgtttggcttacagatacaggggcttacttatttggtaaaatgatgggcaaacataagctttggccagtaataagtccgaataagacaatcgaaggattcataggtggcttgttctgtagtttgatagtgcctcttgcaatgttatattttgtagatttcaatatgaatgtatggatattacttggagtgacattgattttaagtttatttggtcaattaggtgatttagtggaatcaggatttaagcgtcatttcggcgttaaagactcaggtcgaatactacctggacacggtggtattttagaccgatttgacagctttatgtttgtgttaccattattaaatattttattaatacaatcttaatgctgagaacaaatcaataaacgtaaagaggagttgctgagataatttaatgaatctcagaactccttttgaaaattatacgcaatattaactttgaaaattagacgttatattttgtgatttgtcagtatcatattataatgacttatgttacgtatacagcaatcaattttaaaataaaagaaatttataaacaatcgaggtgtagcgagtgagctatttagttacaataattgcatttattattgtttttggtgtactagtaactgttcatgaatatggacatatgttttttgcgaaaagagcaggcattatgtgtccagaatttgcgatcggtatggggccaaaaatttttagttttagaaaaaatgaaacactttacactattaggttattgcctgttggtggatatgttcgtatggcaggagatggcttagaagagccaccagtcgagcccggtatgaacgttaaaattaaactgaatgaagaaaatgaaataacacatatcatattagatgatcatcataagtttcaacaaattgaagcgatcgaagttaaaaaatgtgattttaaggatgacttattcatagaaggtatcactgcttatgataatgaaagacatcattttaaaattgctagaaagtctttctttgttgaaaatggtagcttagttcaaattgctccgagagacagacaatttgcacataaaaagccatggccgaaatttttaacattatttgcgggaccgttatttaactttatattagctttagtcctatttattggtcttgcatattatcaaggtacacctacgtctactgtagaacaagtcgcagataagtatccagctcaacaagcaggattacaaaaaggtgataaaattgttcaaattggcaaatataaaatatctgaatttgatgatgttgataaggcgttagataaagttaaagataataagacgactgttaaatttgaacgtgatggtaaaacgaagtcagttgaattaacacctaaaaagactgaaagaaaactgactaaagtaagttcagagacgaagtatgttctcggattccaaccagcgagtgaacatacacttttcaaaccaattgtatatggatttgaaagctttttgaaaggtagtacactaatttttacagctgtagtcggtatgttggctagtatatttacgggcggattctcatttgatatgttaaatggtccggttggtatttatcataacgtcgactcagttgttaaagcgggtatcattagcttaattggttacactgcgttattaagtgtaaacttaggtattatgaatttaattcctattcctgcactagacggtggtcgtattttatttgttatatatgaagcgattttcagaaaaccagttaataaaaaagcggaaacaacgattattgctattggtgccattttcatggtcgttattatgatattagtaacgtggaatgatattcgacgatatttcttataatttaggaggataaataattatgaagcaatccaaagtttttataccaacgatgcgtgatgtgccatcagaagcagaagcacaaagtcatcgtttattattgaaatcgggtttgataaaacaaagtacaagtgggatttatagttatttaccgctagcaacacgtgtgttaaataatattactgcaattgtgcgacaagaaatggaacgtatcgattctgttgaaattttaatgccagcgttacaacaagctgaattatgggaagaatcaggacgttggggtgcatatggcccagaattaatgcgtttacaagatagacatggaagacaatttgcattaggtccaacacatgaagaattagttacatcaatagtaagaaatgaattgaaatcatacaaacaattaccgatgacattattccaaattcaatctaaattccgtgatgaaaagagaccacgttttggtttacttcgtgggcgtgaatttattatgaaagatgcgtattcattccatgctgacgaggcatcattagatcaaacgtatcaagatatgtatcaagcgtatagccgtatttttgagagagttggcattaatgctagaccagttgtagcagattcaggtgctataggcggtagccatacacatgaatttatggcattaagtgctatcggtgaggatacaatcgtttacagtaaagaaagtgactatgctgctaatatcgaaaaagcagaagtcgtttacgaaccaaatcataagcattctactgtgcaacctttagaaaaaattgaaacaccaaatgttaagactgcacaagaattggcagacttcttaggtagaccagtagatgaaatcgttaaaacgatgattttcaaagttgatggcgaatatattatggttttagtgcgtggccatcatgaaattaatgacattaaattaaaatcttatttcggcacagataatattgaattagcaacacaagacgaaattgttaatttagttggtgcaaatccgggttcactaggtcctgttattgataaagaaatcaaaatttatgcagataattttgtgcaagatttaaataatttagttgtcggtgctaacgaagatggctatcacttaattaatgtaaatgtaggtagagacttcaacgttgatgaatatggcgatttccgttttattttagaaggcgaaaagttaagtgatggttcaggcgttgcacattttgctgaaggtattgaagttggtcaagtattcaaattgggtactaagtattcagaatcaatgaatgctacattcttagataaccaaggaaaagctcaacctttaattatgggctgttacggtattggaatttctagaacgctaagtgcgattgttgaacaaaatcacgatgataatggaattgtttggcctaaatcagttactccatttgatttacatttaatttctattaatcctaagaaagatgatcaacgagagctagcagatgcactatatgctgaatttaatactaaatttgatgtgttgtacgatgatcgtcaggaacgtgcaggtgtcaaatttaatgatgccgatttaattggtttaccactgcgaattgttgttggtaaacgtgcatcggaaggtattgtagaagttaaagaacgtttaacaggtgatagcgaagaagttcacattgatgacttaatgactgtcattacaaataaatatgataacttaaaataattaagatcgaatgaattataagagtaggaaaaagctgaaagaaatctgatgcttatgtcctgctcttattatttttgatataatgattattcgatgaaaaatgactgaagacatagtataattaaagataaatttgttttaacaatattatgattagccaaatataaagcatttaattttctatcattactatgctcacataatctaaatattgttcgaacacgtaaaagtaatttctatttaaggtggtaattgtcttggcaatgacagagcaacaaaaatttaaagtgcttgctgatcaaattaaaatttcaaatcaattagatgctgaaattttaaattcaggtgaactgacacgtatagatgtttctaacaaaaacagaacatgggaatttcatattacattaccacaattcttagctcatgaagattatttattatttataaatgcaatagagcaagagtttaaagatatcgccaacgttacatgtcgttttacggtaacaaatggcacgaatcaagatgaacatgcaattaaatactttgggcactgtattgaccaaacagctttatctccaaaagttaaaggtcaattgaaacagaaaaagcttattatgtctggaaaagtattaaaagtaatggtatcaaatgacattgaacgtaatcattttgataaggcatgtaatggaagtcttatcaaagcgtttagaaattgtggttttgatatcgataaaatcatattcgaaacaaatgataatgatcaagaacaaaacttagcttctttagaagcacatattcaagaagaagacgaacaaagtgcacgattggcaacagagaaacttgaaaaaatgaaagctgaaaaagcgaaacaacaagataacaacgaaagtgctgtcgataagtgtcaaattggtaagccgattcaaattgaaaatattaaaccaattgaatctattattgaggaagagtttaaagttgcaatagagggtgtcatttttgatataaacttaaaagaacttaaaagtggtcgtcatatcgtagaaattaaagtgactgactatacggactcattagttttaaaaatgtttactcgtaaaaacaaagatgatttagaacattttaaagcgctaagtgtaggtaaatgggttagggctcaaggtcgtattgaagaagatacatttattagagatttagttatgatgatgtctgatattgaagagattaaaaaagcgacaaaaaaagataaggctgaagaaaagcgtgtagaattccacttgcatactgcaatgagccaaatggatggtatacccaatattggtgcgtatgttaaacaggcagcagactggggacatccagccattgcggttacagaccataatgttgtgcaagcatttccagatgctcacgcagcagcggaaaaacatggcattaaaatgatatacggtatggaaggtatgttagttgatgatggtgttccgattgcatacaaaccacaagatgtcgtattaaaagatgctacttatgttgtgttcgacgttgagacaactggtttatcaaatcagtatgataaaatcatcgagcttgcagctgtgaaagttcataacggtgaaatcatcgataagtttgaaaggtttagtaatccgcatgaacgattatcggaaacgattatcaatttgacgcatattactgatgatatgttagtagatgcccctgagattgaagaagtacttacagagtttaaagaatgggttggcgatgcgatattcgtagcgcataatgcttcgtttgatatgggctttatcgatacgggatatgaacgtcttgggtttggaccatcaacgaatggtgttatcgatactttagaattatctcgtacgattaatactgaatatggtaaacatggtttgaatttcttagctaaaaaatatggcgtagaattaacgcaacatcaccgtgccatttatgatacagaagcaacagcttacattttcataaaaatggttcaacaaatgaaagaattaggtgtattaaatcataacgaaatcaacaaaaaactcagtaatgaagatgcatataaacgtgcaagacctagccatgtcacattaattgtacaaaaccaacaaggtcttaaaaatctatttaaaattgtaagtgcatcattggtgaagtatttctaccgtacacctcgaattccacgttcattgttagatgaatatcgtgagggattattggtaggtacagcgtgtgatgaaggtgaattatttacggcagttatgcagaaggaccagagccaagttgaaaaaattgccaaatattatgattttattgaaattcaaccaccggcactttatcaagatttaattgatagagagcttattagagatactgaaacattacatgaaatttatcaacgtttaatacatgcaggtgacacagcgggtatacctgttattgcgacaggaaatgcacactatttgtttgaacatgatggtatcgcacgtaaaattttaatagcatcacaacccggcaatccacttaatcgctcaactttaccggaagcacattttagaactacagatgaaatgttaaacgagtttcattttttaggtgaagaaaaagcgcatgaaattgttgtgaaaaatacaaacgaattagcagatcgaattgaacgtgttgttcctattaaagatgaattatacacaccgcgtatggaaggtgctaacgaagaaattagagaactaagttatacaaatgcgcgtaaactgtatggtgaagacctgcctcaaatcgtaattgatcgattagaaaaagaattaaaaagtattatcggtaatggatttgcggtaatttacttaatttcgcaacgtttagttaaaaaatcattagatgatggatacttagttggttcccgtggttcagtaggttctagttttgtagcgacaatgactgagattactgaagtaaacccgttaccgccacactatatttgtccgaactgtaaaacgagtgaatttttcaatgatggttcagtaggatcaggattcgatttacctgataagacgtgtgaaacttgtggagcgccacttattaaagaaggacaagatattccgtttgaaacatttttaggatttaagggagataaagttcctgatatcgacttaaactttagtggtgaatatcaaccgaatgcccataactacacaaaagtattatttggtgaggataaagtattccgtgcaggtacaattggtaccgttgctgaaaagactgcttttggttatgttaaaggttatttgaatgatcaaggcatccacaaaagaggcgctgaaatagatcgactcgttaaaggatgtacaggtgttaaacgtacaactggacagcatccaggaggtattattgtagtacctgattacatggatatttatgattttacgccgatacaatatcctgccgatgatcaaaattcagcatggatgacgacacattttgatttccattctattcatgataatgtattaaaacttgatatacttggacacgatgatccaacaatgattcgtatgcttcaagatttatcgggcattgatccaaaaacgatacctgtagatgacaaagaagtcatgcaaatatttagtacacctgaaagtttaggtgttactgaagatgaaattttatgtaaaacaggtacgtttggggttccagaattcggtacagggttcgtgcgtcaaatgttagaagatacaaagccaacaacattttctgaattagttcaaatctcaggattatctcatggtacagatgtgtggttaggcaatgctcaagaattaattaaaaccggtatatgtgatttatcaagtgtaattggttgtcgtgatgatatcatggtttatttaatgtatgctggtttagaaccatcaatggcttttaaaataatggagtcagtacgtaaaggtaaaggtttaactgaagaaatgattgaaacgatgaaagaaaatgaagtgccggattggtatttagattcatgtcttaaaattaagtacatgttccctaaagcccatgcagcagcatacgttttaatggcagtacgtatcgcatatttcaaagtacatcatccactttattactatgcatcttactttacaattcgtgcgtcagattttgatttaatcacgatgattaaagataaaacaagcattcgaaatactgtaaaagacatgtattctcgctatatggatctaggtaaaaaagaaaaagacgtattaacagtcttggaaattatgaatgaaatggcgcatcgaggttatcgaatgcaaccgattagtttagaaaagagtcaggcgttcgaatttatcattgaaggcgatacacttattccgccgttcatatcagtgcctgggcttggcgaaaacgttgcgaaacgaattgttgaagctcgtgacgatggcccatttttatcaaaagaagatttaaacaaaaaagctggattatctcagaaaattattgagtatttagatgagttaggctcattaccgaatttaccagataaagctcaactttcgatatttgatatgtaaaatgaaataatcaaggtatttatttaatgcgtatggcgtagttaaagaaatacaaaattggtgctggacataaaattatgcctgtatttcttttcaacgtcttacgagtctattcgaatgtaatggtgaaataaatgaacaaacttttacaagaatctctgattaatagtgaagtcatttgtttcaagcataaacttatgctataattaagttgcttaaaaattagtgaactcaggcagaagagtgggagattcccgctcttttctatttgccaaaaagggaggcctgtatgagtaaaattacagaacaagtagaagtgattgttcaaccaattatggaagacttgaattttgaacttgtagacgttgaatatgtcaaagagggtagagatcattttcttagaatctctattgataaagaaggtggcgtagatttaaatgattgtacgctagcttctgaaaaaataagtgaagctatggatgcaaatgatcctattcctgaaatgtattatttagacgtagcgtcacctggtgcagaacgtccaattaaaaaagaacaagatttccaaaatgcaataactaaacctgtatttgtttctttatatgtaccaattgaaggtgaaaaggaatggttaggcattttacaagaagtcaataatgaaacaattgtagtacaagttaaaatcaaagcaagaacgaaagatatagagataccgagagacaaaatagcaaaagcacgtcacgcagttatgatttaacgtgatgaggaggaaaaaacgtgtcaagtaatgaattattattagctactgagtatttagaaaaagaaaagaagattcctagagcagtattaattgatgctattgaagcagctttaattactgcatacaaaaagaattatgatagtgcaagaaatgtccgtgtggaattaaatatggatcaaggtactttcaaagttatcgctcgtaaagatgttgttgaagaagtatttgacgacagagatgaagtggatttaagtacagcgcttgttaaaaaccctgcatatgaaattggtgatatatacgaagaagatgtaacacctaaagattttggtcgtgtaggtgctcaagcagcgaaacaagcagtaatgcaacgtcttcgtgatgctgaacgtgaaattttatttgaagaatttatagacaaagaagaagacatacttactggaattattgaccgtgttgaccatcgttatgtatatgtgaatttaggtcgtatcgaagctgttttatctgaagcagaaagaagtcctaacgaaaaatatattcctaacgaacgtatcaaagtatatgttaacaaagtggaacaaacgacaaaaggtcctcaaatctatgtttctcgtagccatccaggtttattaaaacgtttatttgaacaagaagttccagaaatttacgatggtactgtaattgttaaatcagtagcacgtgaagctggcgatcgctctaaaattagtgtcttctctgaaaacaatgatatagatgctgttggtgcatgtgttggtgctaaaggcgcacgtgttgaagctgttgttgaagagctaggtggcgaaaaaatcgacatcgttcaatggaatgaagatccaaaagtatttgtaaaaaatgctttaagcccttctcaagttttagaagttattgttgatgaaacaaatcaatctacagtagttgttgttcctgattatcaattgtcattagcgattggtaaaagaggacaaaacgcacgtctagctgctaaattaaccggctggaaaattgatattaaatcagaaacagatgcgcgtgaagcgggtatctatccagtagttgaagctgaaaaagtaactgaagaagatattgctttagaagatgctgacacaacagaatcaaccgaagaggtaaatgatgtttcagttgaaacaaatgtagagaaagaatctgaataataggttggagtgaagtatctatgaaaaagaaaaaaattccgatgcgaaaatgtattctttcaaatgaaatgcatcccaaaaaagatatgattcgtgttgttgttaataaagaaggcgaaatctttgcggatgttactggaaagaaacaaggccgtggcgcatatgtttctaaagatgttgctatggttgaaaaagcacaacaaaaagaaattttagaaaaatattttaaagcatctaaagagcaattggatcctgtttacaaagaaattattagattaatttatagagaagagattccaaaatgagtatagatcaaatattaaactttttaggattagcaatgagagctggtaaagtaaaaacaggtgaatcagtcattgttaatgagattaaaaaaggaaatttgaagctcgttattgttgcaaatgatgcgtctgataatacagctaaattaattacagataaatgtaagagttacaaagttccattcagaaagtttggaaatcgaaatgaattgggaatagcacttggaaaaggtgagcgtgttaatgtagggattactgacccaggctttgctaaaaagttgctatcaatgatagatgaatatcataaggagtgattatatgagtaaacaaagaatttacgaatatgcgaaagaattaaatctaaagagtaaagagattatagatgagttaaaaagcatgaatatagaggtttcaaatcatatgcaagctttggaagatgaccaaattaaagcattagataaaaagttcaaaaaagaacaaaagaacgacaataaacaaagcactcaaaataatcaccaaaaatcaaacaatcaaaaccaaaataaagggcaacaaaaagataacaaaaagaatcaacaacaaaataataaaggcaacaaaggcaataaaaagaataatagaaataataagaaaaataacaagaataataaaccacaaaatcaaccagctgctccaaaagaaataccatcaaaagtgacatatcaagaaggtattacagtaggcgaatttgcggataaattaaatgttgaatcatcagaaattatcaaaaaattattcttacttggtattgttgctaatatcaatcaatcattaaatcaagaaacaatcgaattaattgccgatgattatggcgttgaggttgaagaagaagttgtgattaatgaagaagatttatcaatctacttcgaagacgaaaaagatgatccagaagcaattgagagaccagcagttgtaacaattatgggacatgttgaccatggtaaaacgactttattagattcaattcgtcatacaaaagttacagcaggtgaagcaggcggaatcactcaacatattggtgcatatcaaattgaaaacgatggcaaaaaaatcactttcttagatacaccgggacatgctgcatttacaacgatgcgtgcgcgtggtgcacaagtaacagatattacaattttagtagtagcagctgacgatggtgttatgccacaaacaattgaagcaattaaccatgctaaagaagcagaagtaccaattattgttgcagtaaataaaattgataaaccaacttcaaatcctgatcgagttatgcaagaattaactgaatatggtttaattcctgaagattggggcggcgaaacaattttcgttccactttctgcattaagtggtgatggtatcgacgatttattagaaatgataggattagttgcagaagttcaagaacttaaagcaaatcctaaaaaccgtgctgttggtacagttatcgaagctgaattagataaatcacgtggtccttctgcatcattattagtacaaaacggtacattaaatgttggtgatgcgattgtagttggtaatacttacggccgtatccgtgcaatggttaatgacttaggtcaaagaatcaaaacggctggtccatcaacgcctgttgaaattacaggtattaatgatgtgccacaagctggggatcgctttgttgtatttagtgatgaaaaacaagctcgtcgtattggtgaatcaagacacgaagctagcattgtacaacaacgtcaagaaagtaaaaatgtttcattagataacctgtttgaacaaatgaaacaaggtgaaatgaaagatttaaacgttattattaaaggtgatgttcaaggttctgttgaagctttagctgcatcattaatgaaaattgatgttgaaggcgtaaatgttcgtatcattcatacagcggttggtgcaattaatgagtcagacgtgacacttgctaatgcctcaaatggtattatcattggtttcaatgttcgtccagacagtggtgcaaaacgtgctgcagaagctgaaaatgttgatatgcgtttacacagagttatttataatgttatcgaagaaattgaatcagcgatgaaaggtttacttgatccagaatttgaagaacaagttatcggacaagctgaagttcgtcaaacattcaaagtttctaaagttggtactattgctggatgttatgttactgaaggtaaaattacgcgaaatgctggtgtacgtattattcgtgatggtattgttcaatatgaaggcgaattagatacacttaaacgtttcaaagatgatgctaaggaagttgcaaaaggttatgaatgtggtattacaattgaaaactacaatgaccttaaagaaggcgatgttatcgaagcatttgaaatggttgaaattaagcgttaa

SEQ ID NO: 63 - DNA, 9355 bp, Staphylococcus aureus
atgtttaaaaagctaataaataaaaagaacactataaataattataatgaagaattagactcgtctaatatacctgaacatatcgctattattatggatggtaatgggcgatgggctaagaagcgaaaaatgcctagaattaaaggccattacgaaggtatgcaaacaataaaaaaaattactaggatagctagtgatattggtgttaagtacttaactttatatgccttttccactgaaaattggtcaagacctgaaagtgaagtaaattatattatgaatttgcctgtcaatttcttaaagacattcttaccggaactaattgaaaaaaatgtcaaagttgaaacaattggatttactgataagttgccaaaatcaacgatagaagcaattaataatgctaaagaaaagacagctaataataccggcttaaaattaatatttgcaattaattatggtggcagagcagaacttgttcatagtattaaaaatatgtttgacgagcttcatcaacaaggtttaaatagtgatatcatagatgaaacatatataaacaatcatttaatgacaaaagactatcctgatccagagttgttaattcgtacttcaggagaacaaagaataagtaatttcttgatttggcaagtttcgtatagtgaatttatctttaatcaaaaattatggcctgactttgacgaagatgaattaattaaatgtataaaaatttatcagtcacgtcaaagacgctttggcggattgagtgaggagtagtatagtatgaaagttagaacgctgacagctattattgccttaatcgtattcttgcctatcttgttaaaaggcggccttgtgttaatgatatttgctaatatattagcattgattgcattaaaagaattgttgaatatgaatatgattaaatttgtttcagttcctggtttaattagtgcagttggtcttatcatcattatgttgccacaacatgcagggccatgggtacaagtaattcaattaaaaagtttaattgcaatgagctttattgtattaagttatactgtcttatctaaaaacagatttagttttatggatgctgcattttgcttaatgtctgtggcttatgtaggcattggttttatgttcttttatgaaacgagatcagaaggattacattacatattatatgcctttttaattgtttggcttacagatacaggggcttacttatttggtaaaatgatgggcaaacataagctttggccagtaataagtccgaataagacaatcgaaggattcataggtggcttgttctgtagtttgatagtgcctcttgcaatgttatattttgtagatttcaatatgaatgtatggatattacttggagtgacattgattttaagtttatttggtcaattaggtgatttagtggaatcaggatttaagcgtcatttcggcgttaaagactcaggtcgaatactacctggacacggtggtattttagaccgatttgacagctttatgtttgtgttaccattattaaatattttattaatacaatcttaatgctgagaacaaatcaataaacgtaaagaggagttgctgagataatttaatgaatctcagaactccttttgaaaattatacgcaatattaactttgaaaattagacgttatattttgtgatttgtcagtatcatattataatgacttatgttacgtatacagcaatcaattttaaaataaaagaaatttataaacaatcgaggtgtagcgagtgagctatttagttacaataattgcatttattattgtttttggtgtactagtaactgttcatgaatatggacatatgttttttgcgaaaagagcaggcattatgtgtccagaatttgcgatcggtatggggccaaaaatttttagttttagaaaaaatgaaacactttacactattaggttattgcctgttggtggatatgttcgtatggcaggagatggcttagaagagccaccagtcgagcccggtatgaacgttaaaattaaactgaatgaagaaaatgaaataacacatatcatattagatgatcatcataagtttcaacaaattgaagcgatcgaagttaaaaaatgtgattttaaggatgacttattcatagaaggtatcactgcttatgataatgaaagacatcattttaaaattgctagaaagtctttctttgttgaaaatggtagcttagttcaaattgctccgagagacagacaatttgcacataaaaagccatggccgaaatttttaacattatttgcgggaccgttatttaactttatattagctttagtcctatttattggtcttgcatattatcaaggtacacctacgtctactgtagaacaagtcgcagataagtatccagctcaacaagcaggattacaaaaaggtgataaaattgttcaaattggcaaatataaaatatctgaatttgatgatgttgataaggcgttagataaagttaaagataataagacgactgttaaatttgaacgtgatggtaaaacgaagtcagttgaattaacacctaaaaagactgaaagaaaactgactaaagtaagttcagagacgaagtatgttctcggattccaaccagcgagtgaacatacacttttcaaaccaattgtatatggatttgaaagctttttgaaaggtagtacactaatttttacagctgtagtcggtatgttggctagtatatttacgggcggattctcatttgatatgttaaatggtccggttggtatttatcataacgtcgactcagttgttaaagcgggtatcattagcttaattggttacactgcgttattaagtgtaaacttaggtattatgaatttaattcctattcctgcactagacggtggtcgtattttatttgttatatatgaagcgattttcagaaaaccagttaataaaaaagcggaaacaacgattattgctattggtgccattttcatggtcgttattatgatattagtaacgtggaatgatattcgacgatatttcttataatttaggaggataaataattatgaagcaatccaaagtttttataccaacgatgcgtgatgtgccatcagaagcagaagcacaaagtcatcgtttattattgaaatcgggtttgataaaacaaagtacaagtgggatttatagttatttaccgctagcaacacgtgtgttaaataatattactgcaattgtgcgacaagaaatggaacgtatcgattctgttgaaattttaatgccagcgttacaacaagctgaattatgggaagaatcaggacgttggggtgcatatggcccagaattaatgcgtttacaagatagacatggaagacaatttgcattaggtccaacacatgaagaattagttacatcaatagtaagaaatgaattgaaatcatacaaacaattaccgatgacattattccaaattcaatctaaattccgtgatgaaaagagaccacgttttggtttacttcgtgggcgtgaatttattatgaaagatgcgtattcattccatgctgacgaggcatcattagatcaaacgtatcaagatatgtatcaagcgtatagccgtatttttgagagagttggcattaatgctagaccagttgtagcagattcaggtgctataggcggtagccatacacatgaatttatggcattaagtgctatcggtgaggatacaatcgtttacagtaaagaaagtgactatgctgctaatatcgaaaaagcagaagtcgtttacgaaccaaatcataagcattctactgtgcaacctttagaaaaaattgaaacaccaaatgttaagactgcacaagaattggcagacttcttaggtagaccagtagatgaaatcgttaaaacgatgattttcaaagttgatggcgaatatattatggttttagtgcgtggccatcatgaaattaatgacattaaattaaaatcttatttcggcacagataatattgaattagcaacacaagacgaaattgttaatttagttggtgcaaatccgggttcactaggtcctgttattgataaagaaatcaaaatttatgcagataattttgtgcaagatttaaataatttagttgtcggtgctaacgaagatggctatcacttaattaatgtaaatgtaggtagagacttcaacgttgatgaatatggcgatttccgttttattttagaaggcgaaaagttaagtgatggttcaggcgttgcacattttgctgaaggtattgaagttggtcaagtattcaaattgggtactaagtattcagaatcaatgaatgctacattcttagataaccaaggaaaagctcaacctttaattatgggctgttacggtattggaatttctagaacgctaagtgcgattgttgaacaaaatcacgatgataatggaattgtttggcctaaatcagttactccatttgatttacatttaatttctattaatcctaagaaagatgatcaacgagagctagcagatgcactatatgctgaatttaatactaaatttgatgtgttgtacgatgatcgtcaggaacgtgcaggtgtcaaatttaatgatgccgatttaattggtttaccactgcgaattgttgttggtaaacgtgcatcggaaggtattgtagaagttaaagaacgtttaacaggtgatagcgaagaagttcacattgatgacttaatgactgtcattacaaataaatatgataacttaaaataattaagatcgaatgaattataagagtaggaaaaagctgaaagaaatctgatgcttatgtcctgctcttattatttttgatataatgattattcgatgaaaaatgactgaagacatagtataattaaagataaatttgttttaacaatattatgattagccaaatataaagcatttaattttctatcattactatgctcacataatctaaatattgttcgaacacgtaaaagtaatttctatttaaggtggtaattgtcttggcaatgacagagcaacaaaaatttaaagtgcttgctgatcaaattaaaatttcaaatcaattagatgctgaaattttaaattcaggtgaactgacacgtatagatgtttctaacaaaaacagaacatgggaatttcatattacattaccacaattcttagctcatgaagattatttattatttataaatgcaatagagcaagagtttaaagatatcgccaacgttacatgtcgttttacggtaacaaatggcacgaatcaagatgaacatgcaattaaatactttgggcactgtattgaccaaacagctttatctccaaaagttaaaggtcaattgaaacagaaaaagcttattatgtctggaaaagtattaaaagtaatggtatcaaatgacattgaacgtaatcattttgataaggcatgtaatggaagtcttatcaaagcgtttagaaattgtggttttgatatcgataaaatcatattcgaaacaaatgataatgatcaagaacaaaacttagcttctttagaagcacatattcaagaagaagacgaacaaagtgcacgattggcaacagagaaacttgaaaaaatgaaagctgaaaaagcgaaacaacaagataacaacgaaagtgctgtcgataagtgtcaaattggtaagccgattcaaattgaaaatattaaaccaattgaatctattattgaggaagagtttaaagttgcaatagagggtgtcatttttgatataaacttaaaagaacttaaaagtggtcgtcatatcgtagaaattaaagtgactgactatacggactcattagttttaaaaatgtttactcgtaaaaacaaagatgatttagaacattttaaagcgctaagtgtaggtaaatgggttagggctcaaggtcgtattgaagaagatacatttattagagatttagttatgatgatgtctgatattgaagagattaaaaaagcgacaaaaaaagataaggctgaagaaaagcgtgtagaattccacttgcatactgcaatgagccaaatggatggtatacccaatattggtgcgtatgttaaacaggcagcagactggggacatccagccattgcggttacagaccataatgttgtgcaagcatttccagatgctcacgcagcagcggaaaaacatggcattaaaatgatatacggtatggaaggtatgttagttgatgatggtgttccgattgcatacaaaccacaagatgtcgtattaaaagatgctacttatgttgtgttcgacgttgagacaactggtttatcaaatcagtatgataaaatcatcgagcttgcagctgtgaaagttcataacggtgaaatcatcgataagtttgaaaggtttagtaatccgcatgaacgattatcggaaacgattatcaatttgacgcatattactgatgatatgttagtagatgcccctgagattgaagaagtacttacagagtttaaagaatgggttggcgatgcgatattcgtagcgcataatgcttcgtttgatatgggctttatcgatacgggatatgaacgtcttgggtttggaccatcaacgaatggtgttatcgatactttagaattatctcgtacgattaatactgaatatggtaaacatggtttgaatttcttagctaaaaaatatggcgtagaattaacgcaacatcaccgtgccatttatgatacagaagcaacagcttacattttcataaaaatggttcaacaaatgaaagaattaggtgtattaaatcataacgaaatcaacaaaaaactcagtaatgaagatgcatataaacgtgcaagacctagccatgtcacattaattgtacaaaaccaacaaggtcttaaaaatctatttaaaattgtaagtgcatcattggtgaagtatttctaccgtacacctcgaattccacgttcattgttagatgaatatcgtgagggattattggtaggtacagcgtgtgatgaaggtgaattatttacggcagttatgcagaaggaccagagccaagttgaaaaaattgccaaatattatgattttattgaaattcaaccaccggcactttatcaagatttaattgatagagagcttattagagatactgaaacattacatgaaatttatcaacgtttaatacatgcaggtgacacagcgggtatacctgttattgcgacaggaaatgcacactatttgtttgaacatgatggtatcgcacgtaaaattttaatagcatcacaacccggcaatccacttaatcgctcaactttaccggaagcacattttagaactacagatgaaatgttaaacgagtttcattttttaggtgaagaaaaagcgcatgaaattgttgtgaaaaatacaaacgaattagcagatcgaattgaacgtgttgttcctattaaagatgaattatacacaccgcgtatggaaggtgctaacgaagaaattagagaactaagttatacaaatgcgcgtaaactgtatggtgaagacctgcctcaaatcgtaattgatcgattagaaaaagaattaaaaagtattatcggtaatggatttgcggtaatttacttaatttcgcaacgtttagttaaaaaatcattagatgatggatacttagttggttcccgtggttcagtaggttctagttttgtagcgacaatgactgagattactgaagtaaacccgttaccgccacactatatttgtccgaactgtaaaacgagtgaatttttcaatgatggttcagtaggatcaggattcgatttacctgataagacgtgtgaaacttgtggagcgccacttattaaagaaggacaagatattccgtttgaaacatttttaggatttaagggagataaagttcctgatatcgacttaaactttagtggtgaatatcaaccgaatgcccataactacacaaaagtattatttggtgaggataaagtattccgtgcaggtacaattggtaccgttgctgaaaagactgcttttggttatgttaaaggttatttgaatgatcaaggcatccacaaaagaggcgctgaaatagatcgactcgttaaaggatgtacaggtgttaaacgtacaactggacagcatccaggaggtattattgtagtacctgattacatggatatttatgattttacgccgatacaatatcctgccgatgatcaaaattcagcatggatgacgacacattttgatttccattctattcatgataatgtattaaaacttgatatacttggacacgatgatccaacaatgattcgtatgcttcaagatttatcgggcattgatccaaaaacgatacctgtagatgacaaagaagtcatgcaaatatttagtacacctgaaagtttaggtgttactgaagatgaaattttatgtaaaacaggtacgtttggggttccagaattcggtacagggttcgtgcgtcaaatgttagaagatacaaagccaacaacattttctgaattagttcaaatctcaggattatctcatggtacagatgtgtggttaggcaatgctcaagaattaattaaaaccggtatatgtgatttatcaagtgtaattggttgtcgtgatgatatcatggtttatttaatgtatgctggtttagaaccatcaatggcttttaaaataatggagtcagtacgtaaaggtaaaggtttaactgaagaaatgattgaaacgatgaaagaaaatgaagtgccggattggtatttagattcatgtcttaaaattaagtacatgttccctaaagcccatgcagcagcatacgttttaatggcagtacgtatcgcatatttcaaagtacatcatccactttattactatgcatcttactttacaattcgtgcgtcagattttgatttaatcacgatgattaaagataaaacaagcattcgaaatactgtaaaagacatgtattctcgctatatggatctaggtaaaaaagaaaaagacgtattaacagtcttggaaattatgaatgaaatggcgcatcgaggttatcgaatgcaaccgattagtttagaaaagagtcaggcgttcgaatttatcattgaaggcgatacacttattccgccgttcatatcagtgcctgggcttggcgaaaacgttgcgaaacgaattgttgaagctcgtgacgatggcccatttttatcaaaagaagatttaaacaaaaaagctggattatctcagaaaattattgagtatttagatgagttaggctcattaccgaatttaccagataaagctcaactttcgatatttgatatgtaa

SEQ ID NO: 64 - DNA, 4405 bp, Staphylococcus aureus
atgagtaaaattacagaacaagtagaagtgattgttcaaccaattatggaagacttgaattttgaacttgtagacgttgaatatgtcaaagagggtagagatcattttcttagaatctctattgataaagaaggtggcgtagatttaaatgattgtacgctagcttctgaaaaaataagtgaagctatggatgcaaatgatcctattcctgaaatgtattatttagacgtagcgtcacctggtgcagaacgtccaattaaaaaagaacaagatttccaaaatgcaataactaaacctgtatttgtttctttatatgtaccaattgaaggtgaaaaggaatggttaggcattttacaagaagtcaataatgaaacaattgtagtacaagttaaaatcaaagcaagaacgaaagatatagagataccgagagacaaaatagcaaaagcacgtcacgcagttatgatttaacgtgatgaggaggaaaaaacgtgtcaagtaatgaattattattagctactgagtatttagaaaaagaaaagaagattcctagagcagtattaattgatgctattgaagcagctttaattactgcatacaaaaagaattatgatagtgcaagaaatgtccgtgtggaattaaatatggatcaaggtactttcaaagttatcgctcgtaaagatgttgttgaagaagtatttgacgacagagatgaagtggatttaagtacagcgcttgttaaaaaccctgcatatgaaattggtgatatatacgaagaagatgtaacacctaaagattttggtcgtgtaggtgctcaagcagcgaaacaagcagtaatgcaacgtcttcgtgatgctgaacgtgaaattttatttgaagaatttatagacaaagaagaagacatacttactggaattattgaccgtgttgaccatcgttatgtatatgtgaatttaggtcgtatcgaagctgttttatctgaagcagaaagaagtcctaacgaaaaatatattcctaacgaacgtatcaaagtatatgttaacaaagtggaacaaacgacaaaaggtcctcaaatctatgtttctcgtagccatccaggtttattaaaacgtttatttgaacaagaagttccagaaatttacgatggtactgtaattgttaaatcagtagcacgtgaagctggcgatcgctctaaaattagtgtcttctctgaaaacaatgatatagatgctgttggtgcatgtgttggtgctaaaggcgcacgtgttgaagctgttgttgaagagctaggtggcgaaaaaatcgacatcgttcaatggaatgaagatccaaaagtatttgtaaaaaatgctttaagcccttctcaagttttagaagttattgttgatgaaacaaatcaatctacagtagttgttgttcctgattatcaattgtcattagcgattggtaaaagaggacaaaacgcacgtctagctgctaaattaaccggctggaaaattgatattaaatcagaaacagatgcgcgtgaagcgggtatctatccagtagttgaagctgaaaaagtaactgaagaagatattgctttagaagatgctgacacaacagaatcaaccgaagaggtaaatgatgtttcagttgaaacaaatgtagagaaagaatctgaataataggttggagtgaagtatctatgaaaaagaaaaaaattccgatgcgaaaatgtattctttcaaatgaaatgcatcccaaaaaagatatgattcgtgttgttgttaataaagaaggcgaaatctttgcggatgttactggaaagaaacaaggccgtggcgcatatgtttctaaagatgttgctatggttgaaaaagcacaacaaaaagaaattttagaaaaatattttaaagcatctaaagagcaattggatcctgtttacaaagaaattattagattaatttatagagaagagattccaaaatgagtatagatcaaatattaaactttttaggattagcaatgagagctggtaaagtaaaaacaggtgaatcagtcattgttaatgagattaaaaaaggaaatttgaagctcgttattgttgcaaatgatgcgtctgataatacagctaaattaattacagataaatgtaagagttacaaagttccattcagaaagtttggaaatcgaaatgaattgggaatagcacttggaaaaggtgagcgtgttaatgtagggattactgacccaggctttgctaaaaagttgctatcaatgatagatgaatatcataaggagtgattatatgagtaaacaaagaatttacgaatatgcgaaagaattaaatctaaagagtaaagagattatagatgagttaaaaagcatgaatatagaggtttcaaatcatatgcaagctttggaagatgaccaaattaaagcattagataaaaagttcaaaaaagaacaaaagaacgacaataaacaaagcactcaaaataatcaccaaaaatcaaacaatcaaaaccaaaataaagggcaacaaaaagataacaaaaagaatcaacaacaaaataataaaggcaacaaaggcaataaaaagaataatagaaataataagaaaaataacaagaataataaaccacaaaatcaaccagctgctccaaaagaaataccatcaaaagtgacatatcaagaaggtattacagtaggcgaatttgcggataaattaaatgttgaatcatcagaaattatcaaaaaattattcttacttggtattgttgctaatatcaatcaatcattaaatcaagaaacaatcgaattaattgccgatgattatggcgttgaggttgaagaagaagttgtgattaatgaagaagatttatcaatctacttcgaagacgaaaaagatgatccagaagcaattgagagaccagcagttgtaacaattatgggacatgttgaccatggtaaaacgactttattagattcaattcgtcatacaaaagttacagcaggtgaagcaggcggaatcactcaacatattggtgcatatcaaattgaaaacgatggcaaaaaaatcactttcttagatacaccgggacatgctgcatttacaacgatgcgtgcgcgtggtgcacaagtaacagatattacaattttagtagtagcagctgacgatggtgttatgccacaaacaattgaagcaattaaccatgctaaagaagcagaagtaccaattattgttgcagtaaataaaattgataaaccaacttcaaatcctgatcgagttatgcaagaattaactgaatatggtttaattcctgaagattggggcggcgaaacaattttcgttccactttctgcattaagtggtgatggtatcgacgatttattagaaatgataggattagttgcagaagttcaagaacttaaagcaaatcctaaaaaccgtgctgttggtacagttatcgaagctgaattagataaatcacgtggtccttctgcatcattattagtacaaaacggtacattaaatgttggtgatgcgattgtagttggtaatacttacggccgtatccgtgcaatggttaatgacttaggtcaaagaatcaaaacggctggtccatcaacgcctgttgaaattacaggtattaatgatgtgccacaagctggggatcgctttgttgtatttagtgatgaaaaacaagctcgtcgtattggtgaatcaagacacgaagctagcattgtacaacaacgtcaagaaagtaaaaatgtttcattagataacctgtttgaacaaatgaaacaaggtgaaatgaaagatttaaacgttattattaaaggtgatgttcaaggttctgttgaagctttagctgcatcattaatgaaaattgatgttgaaggcgtaaatgttcgtatcattcatacagcggttggtgcaattaatgagtcagacgtgacacttgctaatgcctcaaatggtattatcattggtttcaatgttcgtccagacagtggtgcaaaacgtgctgcagaagctgaaaatgttgatatgcgtttacacagagttatttataatgttatcgaagaaattgaatcagcgatgaaaggtttacttgatccagaatttgaagaacaagttatcggacaagctgaagttcgtcaaacattcaaagtttctaaagttggtactattgctggatgttatgttactgaaggtaaaattacgcgaaatgctggtgtacgtattattcgtgatggtattgttcaatatgaaggcgaattagatacacttaaacgtttcaaagatgatgctaaggaagttgcaaaaggttatgaatgtggtattacaattgaaaactacaatgaccttaaagaaggcgatgttatcgaagcatttgaaatggttgaaattaagcgttaa

SEQ ID NO: 65 - DNA, 2807 bp, Staphylococcus aureus
atgagcagtatgagagcagagcgtgttggtgaacaaatgaagaaggaattaatggatatcatcaacaataaagtcaaagatcctcgagttggttttattacaattacagatgttgttttaacaaatgatttatcgcaggctaaagtatttttaactgtattaggtaacgataaagaagtagaaaatacatttaaagcacttgataaagcaaaaggcttcattaagtctgaattaggttctagaatgcgattacgtattatgccggaattaatgtatgaatatgatcaatcaatcgaatatggtaataaaattgaacgaatgattcaagatttacacaaacaagatagataatttagtgttaggtatctggaaaatgtttgataatttcttaatatcggtatattaacattaaacagttaatacatagatgtgtagaaatagttaacattttccagtttttttatgaataaattcagttgatacgctattaaaatatattttaaaaaagaaggtgactatatgtataatgggatattaccagtatataaagagcgcggtttaacaagtcatgacgttgtattcaaattgcgtaaaatattaaaaactaaaaaaataggtcacacgggtacgcttgatcccgaagttgcaggcgtgttaccggtatgtataggtaatgcaacgagagttagtgattatgttatggatatgggcaaagcttatgaagcaactgtatcgataggaagaagtacaacgactgaagatcaaacgggtgatacattggaaacaaaaggtgtacactcagcagattttaataaggacgatattgaccgattgttagaaaattttaaaggtgttattgaacaaattccgccaatgtattcatcagtcaaggtgaatggcaaaaaattatatgaatatgcgcgtaataatgaaacagttgaaagaccaaagcgtaaagttaatattaaagacattgggcgtatatctgaattagattttaaagaaaatgagtgtcattttaaaatacgcgtcatctgtggtaaaggtacatatattagaacgctagcaactgatattggtgtgaaattaggctttccggcacatatgtcgaaattaacacgaatcgagtctggtggatttgtgttgaaagatagccttacattagaacaaataaaagaacttcatgagcaggattcattgcaaaataaattgtttcctttagaatatggattaaagggtttgccaagcattaaaattaaagattcgcacataaaaaaacgtattttaaatgggcagaaatttaataaaaatgaatttgataacaaaattaaagaccaaattgtatttattgatgatgattcagaaaaagtattagcaatttatatggtacaccctacaaaagaatcagaaattaaacctaaaaaagtctttaattaaaggagatagaatttatgaaagtcatagaagtgacacatcctatacaatctaaacagtatattacagaggatgttgcaatggcattcggatttttcgatggcatgcataaaggtcatgacaaagtctttgatatattaaatgaaatagctgaggcacgcagtttaaaaaaagcggtgatgacatttgatccgcatccgtctgtcgtgttgaatcctaaaagaaaacgaacaacgtatttaacaccactttcagataaaatcgaaaaaattagccaacatgatattgattattgtatagtggttaatttttcatctaggtttgctaatgtgagcgttgaagattttgttgaaaattatataattaaaaataatgtaaaagaagtcattgctggttttgattttacttttggtaaatttggaaaaggtaatatgactgttcttcaagaatatgatgcgtttaatacgacaattgtgagtaaacaagaaattgaaaatgaaaaaatttctacaacttctattcgtcaagatttaatcaatggtgagttgcaaaaagcgaatgatgctttaggctatatttattctattaaaggcactgtagtgcaaggtgaaaaaaggggaagaactattggcttcccaacagctaacattcaacctagtgatgattatttgttacctcgtaaaggtgtttatgctgttagtattgaaatcggcactgaaaataaattatatcgaggggtagctaacataggtgtaaagccaacatttcatgatcctaacaaagcagaagttgtcatcgaagtgaatatctttgactttgaggataatatttatggtgaacgagtgactgtgaattggcatcatttcttacgtcctgagattaaatttgatggtatcgacccattagttaaacaaatgaacgatgataaatcgcgtgctaaatatttattagcagttgattttggtgatgaagtagcttataatatctagagttgcgtatagttatataaacaatctataccacacctttttcttagtaggtcgaatctccaacgcctaactcggattaaggagtattcaaacattttaaggaggaaattgattatggcaatttcacaagaacgtaaaaacgaaatcattaaagaataccgtgtacacgaaactgatactggttcaccagaagtacaaatcgctgtacttactgcagaaatcaacgcagtaaacgaacacttacgtacacacaaaaaagaccaccattcacgtcgtggattattaaaaatggtaggtcgtcgtagacatttattaaactacttacgtagtaaagatattcaacgttaccgtgaattaattaaatcacttggtatccgtcgttaa

SEQ ID NO: 66 - DNA, 6371 bp, Staphylococcus aureus
ttggcacaagcaaaaaagaaatcgacagctaagaaaaaaacagcatcaaaaaaaagaacaaattcaaggaaaaagaagaatgataatccgatacgttatgtcatagctattttagtagttgtattaatggtgttgggtgttttccaattaggaataatcggtcgtctaattgacagcttctttaattatttatttgggtacagtagatatttaacatatattttagtactcttagcaactggttttattacatactctaaacgtattcctaaaactagacgaacggctggttcgattgtattgcaaattgcattgctatttgtatcacagttagtttttcattttaatagtggtatcaaagctgaaagagaacctgtactttcttatgtatatcagtcataccaacacagtcattttccaaattttggtggcggtgtattaggtttttatttattagagttaagcgtacctttaatttcattatttggtgtatgtattattactattttattattatgctcaagtgttattttattaacaaaccatcaacatcgtgatgttgcaaaagttgcactggaaaatataaaagcttggtttggttcatttaatgaaaaaatgtcggaaagaaaccaagaaaaacaattgaagcgtgaagaaaaagcgagacttaaagaagaacaaaaggcacgtcaaaatgaacagccacaaataaaagatgtgagtgattttacggaagtgcctcaagaaagagatattccaatttatgggcatactgaaaatgaaagtaaaagccagtgtcaaccaagtcgaaaaaaacgagtgtttgatgcagagaatagttcgaataacatcgtaaatcatcaagcagatcagcaagagcaattaacagaacaaactcataacagtgttgaaagtgaaaacactattgaagaagctggtgaagttacgaatgtatcgtatgttgttccaccgttaactttacttaatcaacctgcaaaacaaaaagcaacatctaaagctgaagtacaacgtaaaggacaagtactagagaatacattaaaagattttggggtaaatgcaaaagtgacacaaattaaaattggtcctgcagtaactcaatatgaaattcaaccagctcaaggggttaaagtgagtaaaattgtaaacttgcataatgatattgcattagctttagcagcaaaagatgttagaatcgaagcaccaatacctggtcgctctgcagtaggtattgaagtgccaaatgagaaaatttcattagtttcactaaaagaagttttagatgaaaaattcccgtctaataataaactagaagttggattaggaagagatatatcaggtgatccaattactgttccactaaatgaaatgccacacttattggtggcaggatcgacgggtagtggtaaatctgtttgtataaatggtattattacaagtattttattaaatgctaagccgcatgaagttaaacttatgttaatcgatccgaaaatggttgaactaaatgtttataacggaattccacatttattaattccggttgttacaaatcctcataaagctgctcaagctttagaaaaaattgtagctgagatggaaagacgttatgatttattccaacattcatcaactagaaatattaaaggttataacgaattaatccgtaagcaaaatcaagaattagatgagaagcaaccagaattaccttatatcgttgttattgtagatgagcttgcagatttaatgatggtagctggtaaagaagttgaaaatgcgattcaacgtatcacacaaatggcacgtgcagcaggtatacatttgattgtagcaacacaaagaccttctgtggatgtaattacaggtatcattaaaaataacattccatctagaattgcttttgctgtgagttctcaaacagattcaagaactattattggtactggcggtgcagaaaagttacttggtaaaggtgacatgttatacgttggaaatggtgattcatcacaaacacgtattcaaggggcgtttttaagtgaccaagaggtgcaagatgttgtaaattatgtagtagaacaacaacaggcaaattatgtaaaagaaatggaaccagatgcaccagtggataaatcggaaatgaaaagtgaagatgctttatatgatgaagcgtatttgtttgttgttgaacaacaaaaggcaagtacatcattgttacaacgccaatttagaattggttataatagagcatctaggttgatggatgatttagaacgcaatcaggtaatcggtccacaaaaaggaagcaagcctagacaagttttaatagatcttaataatgacgaggtgtaaaaaaatgtcagaaatgaatgcggtatataacgttaaacaatacattttaaatttgattatgcaaaataaattggaatatggtgaccaacttccaagtaatttatcaattgccagagaattaaatgtaaaaaccgacgatgtttatgaagcaattcaggcattgattactgaacaagtcattaaagataattttgaagagggcacaagtgttaaatcactgccccctttcttttatccattgaatgaacttataagtattgggcaaatgattaaaaatgcaggatttgaatgcggaactgaatacttaaattttgatgagcaaccagcaactatgttagatgcaaatttgttgagcgttgaagaaggatatccagtaaccattatagaacgattacgaactgccgatggagaaccggtcgtctattgtttagataaaattgctaaaaaagaattaacatgtacagagtatcaaatgagcaatggatcgatactaagtgcgataaaagaacaaagtaatcataatatttgttacgctgatacagaaattgaagcggtaaattatgaacctcgaatatccgaagtactgaatgcttcgccacacgaaggtttgattttattaaaaattacgcactacaatgaattagatgaacctattttgtattcattaaattatatgaaaaatagcttagttcaatttaaaatcactagaaaaatatagatgtaagaagatatagaggaggctatatatttgagtagacaatctcaaccaaatatacatatcaaagtttcaccaacaactaaatttaaaacaactactatagtttttaaatttatggcacctttagaatatgacacaattacagctagatcattattaagcaaattattagttcgagcaactaagaaatggccaaccgataagtcgtttaataatcacttagccgatttatatggtgcgtatgtgaatagtacaatttcaaaattcaaagatcagcatgtcattacattttcattagaaattgttaatgaacgttatttaagaaacggtgaatcattatttaatcaaggattagatttattacaagaaatcatttggaatccattaattgaaaataaagcattcaatgataattttgttaaccaagagaaaacattattagccaaaaaaatagaagcaatggtagataataaagcacaatattcgtttttaaaattactcgaccatatgtttgaaaatgaagcatataaatacttatctacaggacaactagaacaaatcccacatattactgctgaaacactatatcatacatatcaatcaatgattaataatgatcaatgttctgtttatgttgtcggcaatgtagaacctgaaagtgttgagaaacaaatacgtgaaaaatttgcacttaaaccattcgataaacatcaattccaacattctactcatcatttacacgatgaagaagttgattatattgttgaatatgatgacgtggatcaagctaaattaaatatgggataccgttttccaacacaatatggacaaagtggatatgctgcgtttgttgtatttaacatgatgtttggaggagatccttcatctgttttatttaatgaagtgcgagaaaagcaaagtttagcgtactctatacattcacaaattgatggcaaaaatggctatttatttgttttgagtggggtttcaagtgataagtacgaaactgcaaaagacactattataagtgaatttgaaaaaataaaagcaggagatttcactgaagaaaaattagagttagctaaaaaagtaatcatttctcatcgatatgaatctgaagatcgtccgaaaagtattatagagattatgcataaccaaatattattagagcaaccacaaagcaaagaaacatttataaatgatatacagaaggtaagtcgcgaagatattgtttctgttgctgaaaaagcatttttagatacaatctatgtgttgacaaaaggaggggataaataatgaaagagcgttattatgaattaatagacgaaagagtattcgaacaagaattagaaaatggtttacgattatttattatccccaaaccaggttttcaaaagacatttgtcacttacactacacaatttggttcattagataatcaattcaaaccccttggacaagaccaatttgttactgtacctgatggagttgctcactttttagaacataaattatttgaaaaagaagaagaagacttatttactgcgtttgctgaagataatgcacaagcaaatgcgtttacaagctttgatcgtacaagctacttgttcagtgcaactgataatattgaaaacaacattaaacgtttacttacaatggttgaaacgccttattttacaaaagaaactgttgataaagaaaaaggtattattgcagaagaaataaaaatgtatcaagaacaacctggatataaattaatgtttaatacattgcgtgcaatgtatcaacgacatccaatacgtgttgatattgccggtagtgtagaaagtatatacgatattacaaaagatgatttgtatctatgttatgaaacgttttatcatccatcaaatatggttttatttgttgttggtgatgtgaatccagaagaaatatgtcgaatagtaaaacaacacgaggatgctcgtaataaagttaaccaacccaaaatcgaacgaggacttgttgatgaaccggaggatgttaaagaagcatttgttactgaatctatgaaaattcaatcaccaagactaatgcttggttttaaaaataaaccattacaagaagcgcctcaaaaatatgtacaacgtgatttagaaatgtcattattctttgagttaatttttggggaagaaacagatttttatcagaatttattaaacgaaggacttatcgatgatacatttggttatcaatttgtactagagccgacgtatagtttttcaatcgtgacaagcgctactgaagaaccagataaattaaaaaaattattattagatgagttgcgtgataaaaaaggcaatttccaagatgcagaagcatttgaacttttgaaaaagcaatttataggtgaattcatatcaagtttaaactcacctgaatatattgctaatcaatatactaaattgtattttgaaggtgttagcgtgtttgacatgttagacattgttgaaaatatcacgttagatagtattaacgaaacgtcatcgttatatttaaatttagatcagcaagtcgatagtcgtttggagattaaaaagtaatgaaagcattagtattaggtggttctggttcaattggttctgagatagtcaaacaattattaactgatggatttgaagtttatgtgcaatattatcgtactgatataaatgaattaactagcaaatttaatgatgataaagttcgttttatacaagcggatttatctcaaacaattgatattgacaaaacatttggtgacattaaatcattagactgtttaatatatgcaagtggtcagtctttatatggtgttttacaagatatgaaagaccatgatattgatgcatgttatcagttaaatgtcttgcaattaattcgattatgtagatatttcgttgatgttttacgtcaaagtgccaatggaagaattattgtaatttcatcaatttggggtgagacaggagctagtatggaaactatttattcggcgatgaaaagtgcacaattaggtttcgttaaggcgcttagtcaagagcttgcactaacatcagtgacagtaaatgctatcgcacctggatttgtagccggtaatatggcaagtgagtggcaagaagatgaacttcaagcaatgataactgaattaccacaacagcgattggttttaccgagtgaggttgctcatacatgcgcctatttatatcactcaaatgctagaagcgttactggaactatacagaaagttaatggtgcttggtatatttaa

SEQ ID NO: 67 - DNA, 4466 bp, Staphylococcus aureus
atggctcagcaacaaattcatgatactaaaaataaactagaaaaagctgtcttagtcggtgtacatgctcaagatgataagcaatttaattttgagtctacaatggaggaattatcatctttatcagagacttgccaacttgaagtgttgggtcaaattactcaaaacagagatcgtgtagatcgcaaatattatgttggtaaaggtaaaattgaagaaattcaagcatttattgagttcaaagatattgatgtagtcatcacaaatgatgaattaacgactgcacaatccaaatcactaaatgaagctttaggtgtaaaaattattgatagaactcagttgattcttgaaatatttgcattaagagcaagaagtaaagaaggtaaattgcaagtagagctagcacaacttgattatttattacctagattgcaaggccatggtaaaagtctttctcgtttaggtggcggtattggaactagaggccctggtgaaacgaagttagagatggatcgcagacatattcgaactcgtatgaatgaaattaaacatcaattgcggacggtagaagaacatcgcgaaagatatcgaaataaaagaaatcaaaatcaggtgtttcaagtagctttagttggttatacaaatgctggtaaatcatcatggtttaatgttttagcaaatgaagagacgtatgaaaaagatcaattatttgcaacgttagatcctaaaacacgacaaattcaaataaatgatggatttaatttaattatttcagatactgttggttttatacagaaactacctacgacgttaattgcagcttttaaatcaactttagaagaggctaaaggtgcagatttattagtacatgtcgtagatagtagccatcctgaataccgtacgcagtatgacacagttaatgatttaatcaaacaattagatatgagtcatatttctcaaatagttatttttaataaaaaggacttatgtgatcatgcatcaaatcgtccagcaagtgatttgcctaatgtttttgtttcttctaaaaatgatggtgataaattacttgttaagacgttatttattgatgaaatcaaaaggcaattaacttattatgatgagacaattgcgacgaataatgcagatcgattatattttctaaaacaacatacattagtgactgaacttaaatatgatgaaattgaaaatgtttatcgtataaaaggatttaaaaaataataaaaggacgaaattcaaatgaaagatataagtaagatagtagctgacgtcgaatcaacgttagcaccatattttaaagaaattgaagaaacagcatatattaatcaagaaaaagtattaaatgcatttcatcatgtcaaagcaaccgaaagtgatctacaaggatcaacaggatacgggtatgatgactttggacgtgatcatttagaagaaatatatgcgcaggcatttaaagcagaagatgcaattgttcgtccgcaaattatttcaggtacgcatgcgattactattgcattacaaagtttattaaaacatggtgatgaattaatttatataacgggtagtccatatgacactttacttgaagtcattggcgtaaacggaaatggtattgaaagtttaatggagcacggcgtatcgtataaagatattgcacttaaagaaggtaagatcgatattgaaagtgtgttagatggggtttctgagcgcaccaaagtaatagcgattcaacgttcgaaaggctatgatcaaagaccttcaattccgctagatgaaattgaaaaggtaattactaggttgaaaaacgtgcatcctaatattttaatatttgtggataactgttatggggaatttgttgaaagacgtgaacctatagaatgtggtgccgatttaatagcaggatcattaattaaaaaccctggcggtggtttagctaagattggtggatacattgctggtagaaaagatttaattgaacgatgtggttatagattgacagcacctggtattggtaaagaagcgggtgcatcattaaatgcattgcttgaaatgtatcaaggtttctttttagcaccacacgttgtcagtcagagtcttaaaggtgcattgtttactagtttatttttagaaaaaatgaatatgaacacaacgccgaagtactacgaaaaacgaactgatttaattcaaacagttaaatttgaaacgaaagaacaaatgatttcattttgtcaaagtattcaacacgcatccccaattaatgcacattttagtccagaacctagttatatgcctggttacgaagatgatgttattatggcagctggtacgtttattcaaggttcatcgattgaattatctgcagatggacctattcgtcctccttatgaagcatatgttcaaggaggattaacatatgaacacgttaaaattgctgtgacaagagctgttaatcagttgaaagaacaaggacttatataatagattaaatttcaccctaaatgataatgtgtcttgggtgaaattttttgcggagatttatcagattatttttaaaaattgaaaaaatattttagctgtagattgttttatgtcgttttagaagtcgaaatcgcagttatatcaatgttttaagctttatgttagaaaacctgacatatttttgaaatcctaaaaaaattatgataagttattaacaagttcaaaagtagaggagaggaacaatgatatcgaatgatgcaatcagacgaaatatggctgtcttctctatgagtgtagtaagtaagttaacggatttaacgccaaggcaaatacgttactatgaaacacatgaactcatcaaacctgaaagaacagaaggtcaaaaacgtctgttctcactcaatgatttggaaagattactagaaattaaatcattattagaaaaaggatttaatatcaaagggattaaacaaatcatttatgactcacaagagcatttaacaacagatgaacaagagataagaaaaaagatgattgtagatgccacgcaaaagcctattggagaaactttgccaataaatcgtggtgatttatcccgatttattaaataaaatttggaggattttaaaatgccaaaacgtactttcactaaagaagacattcgtaaatttgcagaagaggaaaatgtaagatatttaagattacaattcactgatattttaggaacaattaaaaatgttgaagtgcctgtaagccaattagaaaaagtacttgataacgaaatgatgtttgacggttcttctatcgaaggtttcgtacgtatcgaagaatcagatatgtacttacatccagatttagatacttgggtaatcttcccatggactgctggacaaggtaaagttgcacgtttaatttgtgatgtatataaaacagatggaacaccatttgaaggggatcctcgtgcaaacttaaaacgtgtattaaaagaaatggaagatttaggcttcacagactttaacctagggcctgaaccagaattcttcttgtttaagttggatgaaaaaggggaaccaactttagaacttaatgatgatggtggatatttcgatttagcacctacagatttaggtgaaaactgtcgtcgtgatattgttttagaattagaggatatgggcttcgatattgaagctagtcaccatgaagttgcccctggtcaacatgaaattgactttaaatatgcagatgctgttacagcatgtgataatatccaaacatttaaattggttgttaaaacaatcgcacgtaaacataatttacacgcaacatttatgcctaaaccattattcggtgtgaatggtagcggtatgcactttaacgtttcattattcaaaggtaaagaaaatgcattctttgatccaaatactgaaatgggcttaacggaaactgcatatcaatttacagcaggtgtgcttaaaaatgcacgcggatttactgctgtatgtaacccgttagtaaactcatataaacgtttagtacctggttatgaagcaccatgttatattgcatggagtggtaaaaaccgttcaccattaatccgtgtaccatcttcaagaggattatctactcgtatcgaagtacgttcagtagatccagctgcaaacccatacatggcgttagctgcaatcttagaagctggactagatggtattaaaaataaattaaaagttccagaaccagttaaccaaaatatttacgaaatgaaccgtgaagaacgtgaagcagtaggcattcaagacttaccttcaacactttatactgcattaaaagcaatgcgtgaaaatgaagttattaaaaaagctttaggaaatcatatctataatcaatttattaattcaaaatcaattgaatgggattactacagaactcaagtatctgaatgggaaagagatcagtacatgaagcaatattaa

SEQ ID NO: 68 - DNA, 2496 bp, Staphylococcus aureus
atggctcagcaacaaattcatgatactaaaaataaactagaaaaagctgtcttagtcggtgtacatgctcaagatgataagcaatttaattttgagtctacaatggaggaattatcatctttatcagagacttgccaacttgaagtgttgggtcaaattactcaaaacagagatcgtgtagatcgcaaatattatgttggtaaaggtaaaattgaagaaattcaagcatttattgagttcaaagatattgatgtagtcatcacaaatgatgaattaacgactgcacaatccaaatcactaaatgaagctttaggtgtaaaaattattgatagaactcagttgattcttgaaatatttgcattaagagcaagaagtaaagaaggtaaattgcaagtagagctagcacaacttgattatttattacctagattgcaaggccatggtaaaagtctttctcgtttaggtggcggtattggaactagaggccctggtgaaacgaagttagagatggatcgcagacatattcgaactcgtatgaatgaaattaaacatcaattgcggacggtagaagaacatcgcgaaagatatcgaaataaaagaaatcaaaatcaggtgtttcaagtagctttagttggttatacaaatgctggtaaatcatcatggtttaatgttttagcaaatgaagagacgtatgaaaaagatcaattatttgcaacgttagatcctaaaacacgacaaattcaaataaatgatggatttaatttaattatttcagatactgttggttttatacagaaactacctacgacgttaattgcagcttttaaatcaactttagaagaggctaaaggtgcagatttattagtacatgtcgtagatagtagccatcctgaataccgtacgcagtatgacacagttaatgatttaatcaaacaattagatatgagtcatatttctcaaatagttatttttaataaaaaggacttatgtgatcatgcatcaaatcgtccagcaagtgatttgcctaatgtttttgtttcttctaaaaatgatggtgataaattacttgttaagacgttatttattgatgaaatcaaaaggcaattaacttattatgatgagacaattgcgacgaataatgcagatcgattatattttctaaaacaacatacattagtgactgaacttaaatatgatgaaattgaaaatgtttatcgtataaaaggatttaaaaaataataaaaggacgaaattcaaatgaaagatataagtaagatagtagctgacgtcgaatcaacgttagcaccatattttaaagaaattgaagaaacagcatatattaatcaagaaaaagtattaaatgcatttcatcatgtcaaagcaaccgaaagtgatctacaaggatcaacaggatacgggtatgatgactttggacgtgatcatttagaagaaatatatgcgcaggcatttaaagcagaagatgcaattgttcgtccgcaaattatttcaggtacgcatgcgattactattgcattacaaagtttattaaaacatggtgatgaattaatttatataacgggtagtccatatgacactttacttgaagtcattggcgtaaacggaaatggtattgaaagtttaatggagcacggcgtatcgtataaagatattgcacttaaagaaggtaagatcgatattgaaagtgtgttagatggggtttctgagcgcaccaaagtaatagcgattcaacgttcgaaaggctatgatcaaagaccttcaattccgctagatgaaattgaaaaggtaattactaggttgaaaaacgtgcatcctaatattttaatatttgtggataactgttatggggaatttgttgaaagacgtgaacctatagaatgtggtgccgatttaatagcaggatcattaattaaaaaccctggcggtggtttagctaagattggtggatacattgctggtagaaaagatttaattgaacgatgtggttatagattgacagcacctggtattggtaaagaagcgggtgcatcattaaatgcattgcttgaaatgtatcaaggtttctttttagcaccacacgttgtcagtcagagtcttaaaggtgcattgtttactagtttatttttagaaaaaatgaatatgaacacaacgccgaagtactacgaaaaacgaactgatttaattcaaacagttaaatttgaaacgaaagaacaaatgatttcattttgtcaaagtattcaacacgcatccccaattaatgcacattttagtccagaacctagttatatgcctggttacgaagatgatgttattatggcagctggtacgtttattcaaggttcatcgattgaattatctgcagatggacctattcgtcctccttatgaagcatatgttcaaggaggattaacatatgaacacgttaaaattgctgtgacaagagctgttaatcagttgaaagaacaaggacttatataa

SEQ ID NO: 69 - DNA, 4400 bp, Staphylococcus aureus
ttggcaatgaataaacaaaataattattcagatgattcaatacaggttttagaggggttagaagcagttcgtaaaagacctggtatgtatattggatcaactgataaacggggattacatcatctagtatatgaaattgtcgataactccgtcgatgaagtattgaatggttacggtaacgaaatagatgtaacaattaataaagatggtagtatttctatagaagataatggacgtggtatgccaacaggtatacataaatcaggtaaaccgacagtcgaagttatctttactgttttacatgcaggaggtaaatttggacaaggcggctataaaacttcaggtggtcttcacggtgttggtgcttcagttgtaaatgcattgagtgaatggcttgaagttgaaatccatcgagatggtagtatatatcatcaaagttttaaaaacggtggttcgccatcttctggtttagtgaaaaaaggtaaaactaagaaaacaggtaccaaagtaacatttaaacctgatgacacaatttttaaagcatctacatcatttaattttgatgttttaagcgaacgactacaagagtctgcgttcttattgaaaaatttaaaaataacgcttaatgatttacgcagtggtaaagagcgtcaagagcattaccattatgaagaaggaatcaaagagtttgttagttatgtcaatgaaggaaaagaagttttgcatgacgtggctacattttcaggtgaagcaaatggtatagaggtagacgtagctttccaatataatgatcaatattcagaaagtattttaagttttgtaaataatgtacgtactaaagatggtggtacacatgaagttggttttaaaacagcaatgacacgtgtatttaatgattatgcacgtcgtattaatgaacttaaaacaaaagataaaaacttagatggtaatgatattcgtgaaggtttaacagctgttgtgtctgttcgtattccagaagaattattacaatttgaaggacaaacgaaatctaaattgggtacttctgaagctagaagtgctgttgattcagttgttgcagacaaattgccattctatttagaagaaaaaggacaattgtctaaatcccttgtgaaaaaagcgattaaagcacaacaagcaagggaagctgcacgtaaagctcgtgaagatgctcgttcaggtaagaaaaacaagcgtaaagacactttgctatctggtaaattaacacctgcacaaagtaaaaacactgaaaaaaatgaattgtatttagtcgaaggtgattctgcgggaggttcagcaaaacttggacgagaccgcaaattccaagcgatattaccattacgtggtaaggtaattaatacagagaaagcacgtctagaagatatttttaaaaatgaagaaattaatacaattatccacacaatcggggcaggcgttggtactgactttaaaattgaagatagtaattataatcgtgtaattattatgactgatgctgatactgatggtgcgcatattcaagtgctattgttaacattcttcttcaaatatatgaaaccgcttgttcaagcaggtcgtgtatttattgctttacctccactttataaattggaaaaaggtaaaggcaaaacaaagcgagttgaatacgcttggacagacgaagagcttaataaattgcaaaaagaacttggtaaaggcttcacgttacaacgttacaaaggtttgggtgagatgaaccctgaacaattatgggaaacgacgatgaacccagaaacacgaactttaattcgtgtacaagttgaagatgaagtgcgttcatctaaacgtgtaacaacattaatgggtgacaaagtacaacctagacgtgaatggattgaaaagcatgttgagtttggtatgcaagaggaccaaagtattttagataattctgaagtacaagtgcttgaaaatgatcaatttgatgaggaggaaatctagtgagtgaaataattcaagatttatcacttgaagatgttttaggtgatcgctttggaagatatagtaaatatattattcaagagcgtgcattgccagatgttcgtgatggtttaaaaccagtacaacgtcgtattttatatgcaatgtattcaagtggtaatacacacgataaaaatttccgtaaaagtgcgaaaacagtcggtgatgttattggtcaatatcatccacatggagacttctcagtgtacgaagcaatggtccgtttaagtcaagactggaagttacgacatgtcttaatagaaatgcatggtaataatggtagtatcgataatgatccgccagcggcaatgcgttacactgaagctaagttaagcttactagctgaagagttattacgtgatattaataaagagacagtttctttcattccaaactatgatgatacgacactcgaaccaatggtattgccatcaagatttcctaacttactagtgaatggttctacaggtatatctgcaggttacgcgacagatataccaccacataatttagctgaagtgattcaagcaacacttaaatatattgataatccggatattacagtcaatcaattaatgaaatatattaaaggtcctgattttccaactggtggtattattcaaggtattgatggtattaaaaaagcttatgaatcaggtaaaggtagaattatagttcgttctaaagttgaagaagaaactttacgcaatggacgtaaacagttaattattactgaaattccatatgaagtgaacaaaagtagcttagtaaaacgtatcgatgaattacgtgctgacaaaaaagtcgatggtatcgttgaagtacgtgatgaaactgatagaactggtttacgaatagcaattgaattgaaaaaagatgtgaacagtgaatcaatcaaaaattatctttataaaaactctgatttacagatttcatataatttcaacatggtcgctattagtgatggtcgtccaaaattgatgggtattcgtcaaattatagatagttatttgaatcatcaaattgaggttgttgcaaatagaacgaagtttgaattagataatgctgaaaaacgtatgcatatcgttgaaggtttgattaaagcgttgtcaattttagataaagtaattgaattgattcgtagctctaaaaacaagcgtgacgctaaagaaaaccttatcgaagtattcgagttcacagaagaacaggctgaagcaattgtaatgttacagttatatcgtttaacaaacactgacatagttgcgcttgaaggtgaacataaagaacttgaagcattaatcaaacaattacgtcatattcttgataaccatgatgcattattgaatgtcataaaagaagaattgaatgaaattaaaaagaaattcaaatctgaacgactgtctttaattgaagcagaaattgaagaaattaaaattgacaaagaagttatggtgcctagtgaagaagttattttaagtatgacacgtcatggatatattaaacgtacttctattcgtagctttaatgctagcggtgttgaggatattggtttaaaagatggtgacagtttacttaaacatcaagaagtaaatacgcaagataccgtactagtatttacaaataaaggtcgttatctatttataccggttcataaattagcagatattcgttggaaagaattggggcaacatgtatcacaaatagttcctatcgaagaagatgaagtggttattaatgtctttaatgaaaaggactttaatacagatgcattttatgtttttgcgactcaaaatggcatgattaagaaaagtacagtgcctctatttaaaacaacgcgttttaataaacctttaattgctactaaagttaaagaaaatgatgatttgattagtgttatgcgctttgaaaaagatcaattaattaccgtcattactaataaaggtatgtcattaacgtataatacaagtgaactatcagataccggattaagggcagctggtgttaaatcaataaatcttaaagctgaagatttcgttgttatgacagaaggtgtttctgaaaatgatactatattgatggccacacaacgcggctcgttaaaacgtattagttttaaaatcttacaagttgctaaaagagcacaacgtggaataactttattaaaagaattaaagaaaaatccacatcgtattgtagctgcacatgtagtgacaggtgaacatagtcaatatacattatattcaaaatcaaatgaagaacatggtttaattaatgatattcataaatctgaacaatatacaaatggctcattcattgtagatacagatgattttggtgaagtaatagacatgtatattagctaa

SEQ ID NO: 70 - DNA, 4566 bp, Staphylococcus aureus
atgaaaaaatggcaatttgttggtactacagctttaggtgcaacactattattaggtgcttgtggtggcggtaatggtggcagtggtaatagtgatttaaaaggggaagctaaaggtgatggctcatcaacagtagcaccaattgtggagaaattaaatgaaaaatgggctcaagatcactcggatgctaaaatctcagcaggacaagctggtacaggtgctggtttccaaaaattcattgcaggagatatcgacttcgctgatgcttctagaccaattaaagatgaagagaagcaaaaattacaagataagaatatcaaatacaaagaatttaaaattgcgcaagatggtgtaacggttgctgtaaataaagaaaatgattttgtagatgaattagacaaacagcaattaaaagcaatttattctggaaaagctaaaacatggaaagatgttaatagtaaatggccagataaaaaaataaatgctgtatcaccaaactcaagtcatggtacttatgacttcttcgaaaatgaagtaatgaataaagaagatattaaagcagaaaaaaatgctgatacaaatgctatcgtttcttctgtaacgaaaaacaaagagggaatcggatactttggatataacttctacgtacaaaataaagataaattaaaagaagttaaaatcaaagatgaaaatggtaaagcaacagagcctacgaaaaaaacaattcaagataactcttatgcattaagtagaccattattcatttatgtaaatgaaaaagcattgaaagataataaagtaatgtcagaatttatcaaattcgtcttagaagataaaggtaaagcagctgaagaagctggatatgtagcagcaccagagaaaacatacaaatcacaattagatgatttaaaagcatttattgataaaaatcaaaaatcagacgacaagaaatctgatgataaaaagtctgaagacaaaaaataataagacgcaatttcaaatgtgtcttgaaacatgattttgatggtgaatcattatttagagtacaaagcttgatttatcgagacgctgattttgacattcagttagtctacaagcttatcaacttaaaatagtggttcatcattattttacaaatctaattattttgggagtaatagaaagaggtttgattatgacttcatctactaatgttaaagctttaatcgaaaaaaatattaataaaaaagggaagcataatgacaaaattataccagttattttagccgcaatttcagcgatttccattttaacaacactaggtatattaatcacattgcttttagaaaccatcacttttttcaccagaattccaataactgaatttctattttctactacttggaatcctaccggttcagaccctaagtttggtatctgggcattgataatagggactttaaaaatcacagttattgcgactatatttgcagttccagtcgggcttggtgcagcaatttatttaagtgaatatgcaagtgaccgtgcacgacgcataattaaaccgatattagaaattttagcaggaataccaacaattgtgtttggtttctttgcattaacctatgttacaccagtattaagatctttcatatcaggtcttggagagtttaatgctataagtcccggcttagttgtcggtattatgattgtccctctcatcacaagtttgagtgaggatgcaatggcatctgtaccaaataaaattcgagaaggtgcctatggacttggagcaactaaattagaagtagcaactaaagtcgtacttcccgcagcaacatcaggtattgtagcttcaatcgttctcgcgatttcaagagcaattggagaaacgatgattgtatcattagcggcaggtagttcgccaacagcttcattaagtttaacaagttcgattcaaacaatgactggatatattgttgagatagcgacaggtgatgcaacatttggatcaaatatttattacagtatttatgctgtagggttcacactatttatctttaccttaatcatgaatttactttctcagtggatttctaagcgttttagggaggagtattaatatggaaacgacagataataatagacaatcactcgtcgatcaacaacttgtccaaaaacatttatcatccagaacggttaaaaataaagtgttcaaactcatatttttagcatgtacattattaggacttgtcgtacttattgcgttgttaactcaaacattgattaaaggggtaagtcatttaaatttacagtttttcactaatttttcttcttcaacaccatctatggctggcgttaaaggcgcgttaatcggttcactttggttaatgttaagtatcattccattatcaatcatcctaggaataggtacagctatatacttagaagaatatgcgaaaaacaacaaatttactcagtttgttaaaatcagtatttccaatttagctggtgtaccatcagttgtatttgggttattaggttacactttgttcgttggtggtgcggggattgaagccttgaaaatgggtaacagtatattggcagcagcgctaacaatgaccttactgatattaccaattattattgtttcaagtcaggaagcaattagagctgtacctaactcagtacgcgaagcttcttatggtttaggtgctaataaatggcaaacgataagacgtgttgtcttaccagcagcgttacctggtattttaactggattcattttgtctctttcaagagcactgggagaaacagcgccacttgtgctaatcggtataccgactatattattggcaacacctagaagtatattggatcaattttcagcattaccaatccaaatatttacttgggcgaaaatgcctcaagaagaattccagaatgttgcatcggcaggcattatcgttttactagttatcttaatcttaatgaatggcgttgcgattattttacgtaacaaatttagtaaaaaattctaatttaaacaatcaatctcatttatctattaaaaagggagttttaaatatggcgcaaacacttgcacaaactaaacaaatatctcaaagtcatacgtttgatgtctcacaaagtcatcataaaacaccagatgatacaaactcacattctgttatatattcaacacaaaatttagacttatggtatggcgaaaatcatgcattacaaaatattaatttagatatttatgaaaaccaaattactgccattataggtccatctggttgtggcaaatcaacatatattaaaactttgaatcgaatggttgagttagtaccttctgtgaaaacagctggtaaaatattatatcgagatcaagacatttttgatcaaaaatattctaaagaacaattacgtacaaatgtgggcatggtctttcaacaacctaatccatttccaaaatcaatatacgataatattacttacggtccaaagattcacggtattaaaaataaaaaagttcttgatgaaatcgttgagaaatcattacgtggcgctgcaatttgggatgaattaaaggataggttgcacacaaatgcatatagtttatccggtgggcaacaacaacgtgtttgtatcgcgcgttgtttagcaattgaacctgaagtcattttaatggatgaaccgacatcagcattagatccaatctcaacattaagagtagaagagttggttcaagaactaaaagaaaagtatacaattattatggttacacataatatgcaacaagcagctcgtgtatcagataaaactgcatttttcttaaatggttatgtcaatgaatatgatgatactgataaaattttctctaacccatcaaacaagaaaacagaagattatatttcaggaaggtttggttgatatataatggcaataattagacagcgatatcaggagcaacttgatgatttaataaaggaattacgtcggttaggtgcaaatgtctatgtgagtattgaaaatggtataaaatcattaagtattgacgatagaggctttgcacgacaaacagttaaaaacgataaacatatcaatcaattaaattatgatattaatgagcgagttatcatgttaattacaaagcaacagcccattgcgagtgatttgcgtatgatgatttcttcattaaaaatcgcctccgatttagaaagaataggagataatgcatcgagtattgccaatattcgattgcgtacaaagattacagatgattatgtgttaacccgtttaaagacaatgggtaaattagctatgttaatgttaaaggacttagatcaagcatttaaaaagaaagataccgtattaataagagaaataattgagcgtgatgaagatatcgatgacttatatagtcatattattaacgcaacgtatcttattgataacgatccatttgtcgctgcacaagctcatttagcagcaagacatttagaacgtattggtgatcatattattaacatcgctgaaagtgtttatttttatttaacaggtacacattacgaacaataa

SEQ ID NO: 71 - DNA, 6414 bp, Staphylococcus aureus
atctataaattgttaatttccattaaagaggttaaaataatagctatagttaaaaatatgggagtggcttatgtgttttcaaaaatacaacctaaagcaacaataattgcaacgattacgttggtatttgtcgctttagctttatatctagtgcctggtttgggactaatatttgcattatttgcaaccataccaggtatcgttttatggaataaatcaatacaatctttcggggttagtgcacttattacagtaattataacaactgttttaggtaatactttcgttttaagtgccatcatattagtcttaattgcaagtttaattattggtcaattgctcaaagaaagaacgtctaaagaaagaatgttatacgtaacaacagtagcgatgagcttaatttcattaatcgcttttatgttactacaaacattcggaaggattccaccatcagcgagcatagtaaaacctttcaagcaaacattacatgaagcgattacgatgagcggtgccgatgcgaatatgacccaaatattagaagaagggtttagacaagcgaccgttcaattaccaggtttcatcattatcattacatttttaatcgtcttaattaacttaatcgttacatttccggttttacgaaaatttaaaatcgctacacctgtatttaagccacttttcgcgtggcaaatgagcggtattttattatggatatacattattgttatcatatgtttattatttacaggtcaaccgagtgtgttccagagcattcttttaaacttccaacttgtgttatcattagtaatgtatattcaaggtttaagtgttattcatttctttggtaaagcgaaaggtttgccgaatgcagtaacgattttactattgattatcggtacaatactgacacctacgacacatattgtaggactacttggtgttatcgatttaagtttgaatttgaagcgaatcatgaaaaataattctaaaaagtgaatagaggtggaataatgaatcggcagtccactaagaaagctttactaataccatttgtcatcatgatcatcacagcaattgttttaatgggtgtatggtttatctttaatagtcttatagcattaattgcatctatcgttcttgtcgtgatgattattgttagcatcattttattcagacaagctttaatgaaaatggatagttatgtagatggtttgagtgctcaaatttcaacaacaaataataaagcaatcaaacatttaccaattggtatcattgttttagatgaaaatgatcacatcgaatgggttaaccaatttatgacaaatcatatggaagcaaatgtcatttctgaatctgtaaatgaagtatttccaaacattttaaagcaattagatagagtgaaatccgttgaaatagaatataatcagtatcatttccaagtacgttattctgagaatgatcattgcctctatttctttgatataactgaacaagtacaaacaaatgaactatatgaaaattctaaaccaatcattgcgacattatttttagataactacgatgagattactcaaaatatgaatgatacgcagcgttcggaaatcaattcaatggtaacgcgtgttattagtcgatgggcaactgagtataatatattctttaaaaggtatagttccgatcaattcgtagcctatttaaatcaaaaaatattagctgacttagaagaatctaaatttgatatcttgagtcaattacgtgaaaaaagtgttggttatcgtgcccaattaacattaagtattggtgttggtgaaggtactgaaaatttaatcgatttaggtgaattatcacaatcaggcctagacttagcattagggcgcggtggcgaccaagttgcaattaaaagtattaatggtaatgtgcgtttctatggcggtaagactgacccgatggagaaacgtactcgtgtaagagcacgagtgatctcacatgcgttaaaagatatccttgcagagggtgacaaagtcattatcatgggacataaacgtcctgacttagatgcaattggtgcagcaatcggtgtgtctagatttgcaatgatgaataatttagaagcatacatcgtattaaatgagactgacattgatccaacattacgacgcgtgatgaacgaaattgataaaaagtcagagttaagagagcgatttataacatcagatgatgcttgggatatgatgacatctaagacaaccgtagtgattgttgatacgcataaaccggaactggttttagatgaaaatgtcttaaataaagcaaaccgtaaagttgttatcgatcatcatagacgtggtgaaagcttcatctctaatccattgttgatatatatggaaccatacgcaagttcaacagctgaattggtaacagagttactggaatatcaaccaacagaacaacgtttaacacgtcttgaatcaacagtgatgtatgcaggtattattgtagatacaagaaactttacattacgaacaggatcaagaacattcgatgcagcgagttatttacgtgcacatggtgcagatacgattttaacgcaacatttcttaaaagatgatgtggatacttacattaatcgatctgaattaattcgaactgtaaaagttgaagataatggcatagccattgcgcatggttcagacgataaaatttatcatccagtaacagttgcacaagcagcagatgaactgttaagtttagaaggtattgaagcatcatatgttgttgcgagacgtgaagataatctgattggtatatctgcgcgttcactcggttcagtaaatgttcagttaacaatggaagcacttggtggcggtggacatttaaccaatgctgcaacacaacttaaaggtgtgacagtcgaagaggcgatagcacaattacaacaagcaattacagaacaattaagtaggagtgaagatgcatgaaagtaatttttacacaagatgttaaaggtaaaggtaaaaaaggtgaagttaaagaagtaccagtaggttatgcaaataacttcttattgaaaaagaattatgctgtagaagcaacaccaggtaaccttaaacaattagagttacagaaaaaacgtgcaaaacaagaacgccaacaagaaattgaagatgctaaagcattaaaagaaacgttatcaaacattgaagttgaagtatcagcaaaaactggtgaaggtggtaaattgtttggatcagtaagtacaaaacaaattgccgaagcactaaaagcacaacatgatattaaaattgataaacgtaaaatggatttaccaaatggaattcattccctaggatatacgaatgtacctgttaaattagataaagaagttgaaggtacaattcgcgtacacacagttgaacaataaagttggattgaaataagaggtgtaaccattcatggatagaatgtatgagcaaaatcaaatgccacataacaatgaagctgaacagtctgtcttaggttcaattattatagatccagaattgattaatactactcaggaagttttgcttcctgagtcgttttataggggtgcccatcaacatattttccgtgcaatgatgcacttaaatgaagataataaagaaattgatgttgtaacattgatggatcaattatcgacggaaggtacgttgaatgaagcgggtggcccgcaatatcttgcagagttatctacaaatgtaccaacgacgcgaaatgttcagtattatactgatatcgtttctaagcatgcattaaaacgtagattgattcaaactgcagatagtattgccaatgatggatataatgatgaacttgaactagatgcgattttaagtgatgcagaacgtcgaattttagagctatcatcttctcgtgaaagcgatggctttaaagacattcgagacgtcttaggacaagtgtatgaaacagctgaagagcttgatcaaaatagtggtcaaacaccaggtatacctacaggatatcgagatttagaccaaatgacagcagggttcaaccgaaatgatttaattatccttgcagcgcgtccatctgtaggtaagactgcgttcgcacttaatattgcacaaaaagttgcaacgcatgaagatatgtatacagttggtattttctcactagagatgggtgctgatcagttagccacacgtatgatttgtagttctggtaatgttgactcaaaccgcttaagaacgggtactatgactgaggaagattggagtcgttttactatagcggtaggtaaattatcacgtacgaagatttttattgatgatacaccgggtattcgaattaatgatttacgttctaaatgtcgtcgattaaagcaagaacatggcttagacatgattgtgattgactacttacagttgattcaaggtagtggttcacgtgcgtccgataacagacaacaggaagtttctgaaatctctcgtacattaaaagcattagcccgtgaattagaatgtccagttatcgcattaagtcagttatctcgtggtgttgaacaacgacaagataaacgtccaatgatgagtgatattcgtgaatctggttcgattgagcaagatgccgatatcgttgcattcttataccgtgatgattactataaccgtggcggcgatgaagatgatgacgatgatggtggtttcgagccacaaacgaatgatgaaaacggtgaaattgaaattatcattgctaagcaacgtaacggtccaacaggcacagttaagttacactttatgaaacaatataataaatttaccgatatcgattatgcacatgcagatatgatgtaaaaaagtttttccgtacaataatcattaagatgataaaattgtacggtttttattttgttctgaacgggttgatatatgttaagtttgtgtattgaaagtgataaattagtactgtcaacgcctctgttaaagggtttttaggacgttgaagacgatttgttaaaatgatttttcttttaaaaaggccgaaaatcaatgttcgatttttatttgcattatggtctcgatattggtagaatatcaaatggttaaatgagaaaaacttggaggtgctcacatgtcatcaatcgtagtagttgggacacaatggggagacgaaggaaaaggaaaaataacggatttcttggcagaacagtcagatgttatcgcgcgtttttcaggtggtaataatgcaggccataccattcaatttggcggagaaacatataaattacatttagtaccatctggtatcttttacaaagacaaattagcggtaatcggtaacggtgtcgttgttgatccagttgcactattgaaagaattagacggattaaatgaacgtggcattcctacaagtaatttacgtatatctaatcgtgcgcaagtgattttaccatatcacttagcacaagatgaatatgaagaacgtttacgcggtgacaataagattggtacaactaaaaaaggtatcggtccagcatatgtagacaaagttcaacgtatcggtattcgtatggcagatttacttgaaaaagaaacattcgaaagattattaaaatcaaacattgaatataaacaagcatatttcaaaggtatgtttaacgaaacatgtccatcatttgatgatatctttgaagaatactatgctgcaggtcaacgtttaaaagaatttgtaacagacacatcaaaaatcttagacgatgcatttgtagcagatgaaaaggtacttttcgaaggtgcgcaaggtgtaatgttagatatcgaccatggtacatatccattcgttacatcaagtaatccaattgcaggtaacgttactgttggtacaggtgtaggtcctacattcgtttcgaaggtaattggtgtatgtaaagcttatacatcacgtgttggtgatggtccattccctactgaattattcgatgaagatggacatcatattagagaagttggtcgtgaatacggtacaacaacaggacgtccacgtcgtgtaggttggtttgactcagttgtattacgtcactctcgtcgtgtaagtggtattacagatttatctattaactcaatcgatgttttaacaggcctagacacagtgaaaatctgtacagcttatgaattagacggtaaagaaattactgagtacccagcaaacttagatcaattaaaacgttgtaaaccaatctttgaagagttaccaggttggacagaagacgtaacaagtgtgcgtactttagaagaattacctgaaaatgcacgtaaatatttagagcgtatttcagaattatgtaatgtacaaatttctatcttctcagttggtccagatagagaacaaacaaacctattaaaagaattgtggtag

SEQ ID NO: 72 - DNA, 4853 bp, Staphylococcus aureus
atctataaattgttaatttccattaaagaggttaaaataatagctatagttaaaaatatgggagtggcttatgtgttttcaaaaatacaacctaaagcaacaataattgcaacgattacgttggtatttgtcgctttagctttatatctagtgcctggtttgggactaatatttgcattatttgcaaccataccaggtatcgttttatggaataaatcaatacaatctttcggggttagtgcacttattacagtaattataacaactgttttaggtaatactttcgttttaagtgccatcatattagtcttaattgcaagtttaattattggtcaattgctcaaagaaagaacgtctaaagaaagaatgttatacgtaacaacagtagcgatgagcttaatttcattaatcgcttttatgttactacaaacattcggaaggattccaccatcagcgagcatagtaaaacctttcaagcaaacattacatgaagcgattacgatgagcggtgccgatgcgaatatgacccaaatattagaagaagggtttagacaagcgaccgttcaattaccaggtttcatcattatcattacatttttaatcgtcttaattaacttaatcgttacatttccggttttacgaaaatttaaaatcgctacacctgtatttaagccacttttcgcgtggcaaatgagcggtattttattatggatatacattattgttatcatatgtttattatttacaggtcaaccgagtgtgttccagagcattcttttaaacttccaacttgtgttatcattagtaatgtatattcaaggtttaagtgttattcatttctttggtaaagcgaaaggtttgccgaatgcagtaacgattttactattgattatcggtacaatactgacacctacgacacatattgtaggactacttggtgttatcgatttaagtttgaatttgaagcgaatcatgaaaaataattctaaaaagtgaatagaggtggaataatgaatcggcagtccactaagaaagctttactaataccatttgtcatcatgatcatcacagcaattgttttaatgggtgtatggtttatctttaatagtcttatagcattaattgcatctatcgttcttgtcgtgatgattattgttagcatcattttattcagacaagctttaatgaaaatggatagttatgtagatggtttgagtgctcaaatttcaacaacaaataataaagcaatcaaacatttaccaattggtatcattgttttagatgaaaatgatcacatcgaatgggttaaccaatttatgacaaatcatatggaagcaaatgtcatttctgaatctgtaaatgaagtatttccaaacattttaaagcaattagatagagtgaaatccgttgaaatagaatataatcagtatcatttccaagtacgttattctgagaatgatcattgcctctatttctttgatataactgaacaagtacaaacaaatgaactatatgaaaattctaaaccaatcattgcgacattatttttagataactacgatgagattactcaaaatatgaatgatacgcagcgttcggaaatcaattcaatggtaacgcgtgttattagtcgatgggcaactgagtataatatattctttaaaaggtatagttccgatcaattcgtagcctatttaaatcaaaaaatattagctgacttagaagaatctaaatttgatatcttgagtcaattacgtgaaaaaagtgttggttatcgtgcccaattaacattaagtattggtgttggtgaaggtactgaaaatttaatcgatttaggtgaattatcacaatcaggcctagacttagcattagggcgcggtggcgaccaagttgcaattaaaagtattaatggtaatgtgcgtttctatggcggtaagactgacccgatggagaaacgtactcgtgtaagagcacgagtgatctcacatgcgttaaaagatatccttgcagagggtgacaaagtcattatcatgggacataaacgtcctgacttagatgcaattggtgcagcaatcggtgtgtctagatttgcaatgatgaataatttagaagcatacatcgtattaaatgagactgacattgatccaacattacgacgcgtgatgaacgaaattgataaaaagtcagagttaagagagcgatttataacatcagatgatgcttgggatatgatgacatctaagacaaccgtagtgattgttgatacgcataaaccggaactggttttagatgaaaatgtcttaaataaagcaaaccgtaaagttgttatcgatcatcatagacgtggtgaaagcttcatctctaatccattgttgatatatatggaaccatacgcaagttcaacagctgaattggtaacagagttactggaatatcaaccaacagaacaacgtttaacacgtcttgaatcaacagtgatgtatgcaggtattattgtagatacaagaaactttacattacgaacaggatcaagaacattcgatgcagcgagttatttacgtgcacatggtgcagatacgattttaacgcaacatttcttaaaagatgatgtggatacttacattaatcgatctgaattaattcgaactgtaaaagttgaagataatggcatagccattgcgcatggttcagacgataaaatttatcatccagtaacagttgcacaagcagcagatgaactgttaagtttagaaggtattgaagcatcatatgttgttgcgagacgtgaagataatctgattggtatatctgcgcgttcactcggttcagtaaatgttcagttaacaatggaagcacttggtggcggtggacatttaaccaatgctgcaacacaacttaaaggtgtgacagtcgaagaggcgatagcacaattacaacaagcaattacagaacaattaagtaggagtgaagatgcatgaaagtaatttttacacaagatgttaaaggtaaaggtaaaaaaggtgaagttaaagaagtaccagtaggttatgcaaataacttcttattgaaaaagaattatgctgtagaagcaacaccaggtaaccttaaacaattagagttacagaaaaaacgtgcaaaacaagaacgccaacaagaaattgaagatgctaaagcattaaaagaaacgttatcaaacattgaagttgaagtatcagcaaaaactggtgaaggtggtaaattgtttggatcagtaagtacaaaacaaattgccgaagcactaaaagcacaacatgatattaaaattgataaacgtaaaatggatttaccaaatggaattcattccctaggatatacgaatgtacctgttaaattagataaagaagttgaaggtacaattcgcgtacacacagttgaacaataaagttggattgaaataagaggtgtaaccattcatggatagaatgtatgagcaaaatcaaatgccacataacaatgaagctgaacagtctgtcttaggttcaattattatagatccagaattgattaatactactcaggaagttttgcttcctgagtcgttttataggggtgcccatcaacatattttccgtgcaatgatgcacttaaatgaagataataaagaaattgatgttgtaacattgatggatcaattatcgacggaaggtacgttgaatgaagcgggtggcccgcaatatcttgcagagttatctacaaatgtaccaacgacgcgaaatgttcagtattatactgatatcgtttctaagcatgcattaaaacgtagattgattcaaactgcagatagtattgccaatgatggatataatgatgaacttgaactagatgcgattttaagtgatgcagaacgtcgaattttagagctatcatcttctcgtgaaagcgatggctttaaagacattcgagacgtcttaggacaagtgtatgaaacagctgaagagcttgatcaaaatagtggtcaaacaccaggtatacctacaggatatcgagatttagaccaaatgacagcagggttcaaccgaaatgatttaattatccttgcagcgcgtccatctgtaggtaagactgcgttcgcacttaatattgcacaaaaagttgcaacgcatgaagatatgtatacagttggtattttctcactagagatgggtgctgatcagttagccacacgtatgatttgtagttctggtaatgttgactcaaaccgcttaagaacgggtactatgactgaggaagattggagtcgttttactatagcggtaggtaaattatcacgtacgaagatttttattgatgatacaccgggtattcgaattaatgatttacgttctaaatgtcgtcgattaaagcaagaacatggcttagacatgattgtgattgactacttacagttgattcaaggtagtggttcacgtgcgtccgataacagacaacaggaagtttctgaaatctctcgtacattaaaagcattagcccgtgaattagaatgtccagttatcgcattaagtcagttatctcgtggtgttgaacaacgacaagataaacgtccaatgatgagtgatattcgtgaatctggttcgattgagcaagatgccgatatcgttgcattcttataccgtgatgattactataaccgtggcggcgatgaagatgatgacgatgatggtggtttcgagccacaaacgaatgatgaaaacggtgaaattgaaattatcattgctaagcaacgtaacggtccaacaggcacagttaagttacactttatgaaacaatataataaatttaccgatatcgattatgcacatgcagatatgatgtaa

SEQ ID NO: 73 - DNA, 2223 bp, Staphylococcus aureus
atgatccgtctaggtaaaatgtcagatttagatcaaatcttaaatctagtagaagaagcaaaagaattaatgaaagaacacgacaacgagcaatgggacgatcagtacccacttttagaacattttgaagaagatattgctaaagattatttgtacgtattagaggaaaatgacaaaatttatggctttattgttgtcgaccaagaccaagcagaatggtatgatgacattgactggccagtaaatagagaaggcgcctttgttattcatcgattaactggttcgaaagaatataaaggagctgctacagaattattcaattatgttattgatgtagttaaagcacgtggtgcagaagttattttaacggacacctttgcgttaaacaaacctgcacaaggtttatttgcgaaatttggatttcataaggtcggtgaacaattaatggaatatccgccatatgataaaggtgaaccattttatgcatattataaaaatttaaaagaatagaggtaatattaatgacgaaaatcgcatttaccggagggggaacagttggacacgtatcagtaaatttaagtttaattccaactgcattatcacaaggttatgaagcgctttatattggttctaaaaatggtattgaaagagaaatgattgaatcacaactaccagaaattaagtattatcctatttcgagtggtaaattaagaagatatatttctttagaaaatgccaaagacgtatttaaagtattgaaaggtattcttgatgctcgtaaagttttgaaaaaagaaaaacctgatctattattttcaaaaggtggatttgtatctgtgcctgttgttattgcagccaaatcattaaatataccaactattattcatgaatctgacttaacaccaggattagcgaataagatagcacttaaatttgccaagaaaatatatacaacatttgaagaaacgctaaactacttacctaaagagaaagctgattttattggagcaacaattcgagaagatttaaaaaatggtaatgcacataatggttatcaattaacaggctttaatgaaaataaaaaagttttacttgttatgggtggaagcttaggaagtaaaaaattaaatagcattattcgcgaaaacttagatgcattattacaacaatatcaagtgatacatttaactggtaaaggattaaaagatgctcaagttaaaaaatcaggatatatacaatatgaatttgttaaagaggatttaacagatttattagcaattacggatacagtaataagtagagctggatcaaatgcgatttatgagttcttaacattacgtataccaatgttattagtaccattaggtttagatcaatcccgaggcgaccaaattgacaatgcaaatcattttgctgataaaggttatgctaaaacgattgatgaagaacaattaacagcacaaattttattacaagaactaaatgaaatggaacaggaaagaactcgaattatcaataatatgaaatcgtatgaacaaagttatacgaaagaagctttatttgataagatgattaaagacgcattgaattaatggggggtaatgctttatgagtcaatggaaacgtatctctttgctcatcgtttttgcattggtttttggaattatcgcgtttttccacgaatcaagactagggaaatggattgataatgaagtttatgaatttatatattcatcagagagctttattacgacatctatcatgcttggggctactaaagtaggtgaagtctgggcaatgttatgtatttcattacttcttgtggcatatctcatgttaaagcgccacaaaattgaagcattattttttgcattaacaatggcactatctggaattttgaatccagcattaaaaaatatattcgatagagaaagacctacattgctgcgtttaattgatataacaggatttagttttcctagcggtcatgctatgggatcaactgcatattttggaagtggtatctatctattaaatcgattaaatcaaggtaattcaaaaggtattcttatagggttatgtgcagctatgattttattgatttccatatcacgtgtatatctaggtgtacattatccaacagatattattgccggcattattggtggcgtattttgcattattttatcaacgttattacttagaaataaattaataaattaa

SEQ ID NO: 74 - DNA, 4263 bp, Staphylococcus aureus
atgttgaattcatttgatgcagcatatcacagtctttgtgaagaggttttagaaataggaaatacacgaaatgatcgcacaaatacaggtacgatttcgaaatttggtcatcaacttcgctttgacttatctaaaggatttccactattaacgacaaagaaagtttcttttaaattagtagcaaccgaattattatggttcattaaaggagatacaaacatccaatacttattaaaatataataataatatttggaacgaatgggcttttgaaaattatataaaatcagacgagtataacggtccagatatgacagatttcgggcatcgtgcattgagtgatcctgaatttaacgaacaatataaagaacaaatgaaacaatttaagcaacgtattcttgaagatgatacttttgcgaagcaattcggtgatttaggaaatgtttatggtaaacaatggcgagattgggttgataaagatggtaatcattttgatcaacttaaaacagtaattgaacaaattaagcataatccagattcaagacgacacatcgtatctgcatggaatccaacagaaattgatacaatggcacttccgccttgtcataccatgttccagttttatgtccaagatggtaagttaagttgccagttataccaacgtagcgcagatatctttttaggtgtgccatttaatatcgcaagctacgctttattgacacaccttattgccaaagaatgtggacttgaagtaggagaatttgtgcatacatttggagatgcacatatttattcaaatcatattgatgcgattcaaacacaattagcacgtgaaagcttcaatcctccaacattaaaaattaacagtgacaagtctattttcgacataaattatgaagatttggaaattgttgactatgaatcacatccagcaataaaagctccaatagcagtgtagtcattgcatagttagctaaccatatagacatcaaaatgacatcatagtattttcaagtgcaaaaaagtacttttttgtgttaaacgttttcataaattatgcaaaatcattatttctatcacactttatgataaaaattgtgttaaattaaagataacttagtaataaaaaatgaaatgatagaagaaggaggataattatgactttatccattctagttgcacatgacttgcaacgagtaattggttttgaaaatcaattaccttggcacctaccaaatgatttgaaacatgttaaaaaattatcaacaggtcatactttagtaatgggtcgtaagacatttgaatcgattggtaaaccactaccgaatcgtcgaaatgttgtacttacttcagatacaagtttcaacgtagagggcgttgatgtaattcactctattgaagatatttaccaactaccgggccatgttttcatatttggagggcaaacattatttgaagaaatgattgataaagtggacgacatgtatattactgttattgaaggtaaattccgtggtgatacgttctttccaccttatacatttgaagactgggaagttgcctcttcagttgaaggtaaactagatgagaaaaatacaattccacatacctttctacatttaattcgtaaaaaataagggggaaaacgaccatgacaaaacagattatagtaacagactcaacatccgatttatctaaagaatacttagaagcaaacaacattcatgtaattcctttaagtttaactattgaaggagcttcatacgttgaccaagtagatattacatcagaagaatttattaatcatattgaaaatgatgaagatgtaaagacaagtcagccagccataggtgaatttatatctgcttatgaagaactaggaaaagatggctctgaaatcataagtattcatctttcttcaggattaagtggtacatataacactgcttaccaagcaagtcaaatggtagatgctaatgtaactgttattgattcaaaatctatttcttttagtttagggtatcaaatacaacacctagtagagcttgtaaaagaaggtgtctcaacttctgaaatagttaaaaagttaaatcatttaagagaaaacattaaattatttgtagttatagggcaattgaatcaattaattaaaggtggcagaattagtaaaacaaaaggtttgattggtaatcttatgaaaattaaaccaattggtacacttgatgatggtcgcttagagcttgtgcacaatgcgagaactcaaaattctagtatccaatacttgaaaaaggaaattgctgaatttataggagatcatgaaatcaaatccattggtgtcgcacatgctaacgtcattgaatatgttgataaattgaagaaagtttttaacgaagcttttcatgtgaataattacgatataaatgtaactacaccagttatttctgcacatactggtcaaggtgcgattggcctcgtagtccttaagaagtaaatttaatcttttcagtgttaattacttccatttcaatcctttatagactaaatttataattagatagatagaggaggtaattcatatgacaaaagaatatgcaacattagcaggaggatgtttctggtgcatggttaaaccatttacatcatatccaggcatcaagtcagtcgtatctggttatagtggcggtcatgttgataaccctacttatgaacaggtatgtacgaataaaaccggccatgtcgaagcagtacaaattacgtttgatccagaggttacttcctttgaaaatatattagacatatatttcaaaacatttgacccaactgatgatcaagggcaatttttcgatagaggcgaaagctatcaaccagtcattttctatcatgatgagcatcagaaaaaggctgctgagtttaaaaagcaacaattaaatgaacaaggtattttcaagaaaccagtgattacacctattaaaccatataaaaatttctatccagctgaagactaccatcaagattattataaaaagaacccggtacattattaccaatatcaacgtggttcaggtagaaaagcgtttatagaatcacattgggggaatcaaaatgcttaaaaaagataaaagtgaactaacagacatagaatatattgttacacaagaaaatggcactgaaccaccatttatgaatgaatattggaatcattttgctaaagggatttatgtagataagatttctggtaaacctttatttacatctgaagaaaagtttcattctgaatgtggatggcctagcttttctaaagcgcttgatgacgatgaaattatagaattagtcgacaaatcatttggtatggtaagaactgaagtgcgttcagaagaatcaaatagtcatttaggacacgtctttaatgatggacctaaagaaagtggcggcttaagatactgtatcaattccgctgcaattcaatttattccatatgaaaaattagaagaattgggttatggcgatttaatatcacattttgataagtaggagtggaaagtatgtttaaaaaattattcggaaaaggcaaagaagttcagaaagatatcgcaatttatgcaccattaactggagaatacgtgaaaattgaagatattccagatcctgtattcgcacaaaaaatgatgggcgaaggttttggtattaatccaactgaaggagaagttgtgtctccaattgcaggacgtgttgacaatgtctttccaactaagcatgcgattgggttaaaagcagataacggattagaattattagttcatatcggtttagacacagttcaattagacggtgaaggatttgaagtgttagtgtctagtggtgacgaagttaacgtcggagatccattagtaagattcaaccttgaatttattaataataacgctaaatctgttatttcaccaattataattactaacactgatcaagcagcttcaattaatatttatgatgaaaatgctgtgattaaaggtgaaacaaaagtgattgatgtgacaatgaactaatgaaaaactattcgttttatcaatttgtcatgacagttcgtggtcgacacgacgataaaggtcgtctagcagaagagatatttgacgatcttgctttcccaaaacacgatgatgattttaacatactgtctgattatattgagacacatggtgatttcacattgccaatgtctgtatttgatgatttatatgaagaatatacggaatggctaaaattttaa

SEQ ID NO: 75 - DNA, 2807 bp, Staphylococcus aureus
atgaattatccaaatggtaaaccatatcgtaaaaatagtgctatagacggagggaaaaagaccgctgcctttagtaatattgagtatggtggacgtggtatgtcacttgaaaaagatatcgaacattcaaatacgttttatcttaaaagcgacattgcagttattcacaaaaagcctacgccagtacaaatagttaatgtcaactatcctaagcggagtaaagctgtgattaacgaagcttattttcgtacaccttcaacaactgattacaacggcgtttatcaaggttattatattgattttgaagcaaaggaaactaaaaacaagacgtcctttcctttaaataatattcatgaccatcaagtcgaacatatgaaaaatgcatatcaacaaaaaggtattgtgtttttaatgattcgttttaaaacgctagatgaagtttatcttttaccctattcaaaattcgaagtattttggaagagatataaagataatattaaaaagtctataacagttgatgaaatacgaaaaaatggttaccatattccttatcagtatcaaccaagattagactatctaaaagcagttgataagttgatattagatgaaagtgaggaccgcgtatgacggaaaacaaaggatcttctcagcctaagaaaaacggtaataatggtgggaaatccaactcaaaaaagaatagaaatgtgaagagaacgattattaagattattggcttcatgattattgcatttttcgttgttcttttactaggtatcttattgtttgcttattatgcttggaaagcacctgcttttaccgaagctaaattacaagatccgattcctgcaaagatatatgacaagaacggagaacttgttaaaacattagataatggccaaagacatgagcatgtaaatttaaaagacgtgccgaaatcaatgaaagacgcagtacttgcaactgaagacaatcgtttctacgaacatggcgcacttgattataaacgtttattcggtgcaattggtaagaacttgactggtggatttggttctgaaggtgcctcaacattaacacaacaagttgttaaagatgcatttttatcacaacataaatctattggacgtaaagctcaagaagcatacttatcatatcgtttagaacaagagtatagtaaagatgatatcttccaagtatatctaaacaaaatttactgttctgatggcgtaacaggtattaaagctgctgctaagtattactttaataaagatttaaaagatttaaacttagcggaagaagcttatttagccggtttacctcaggttccaaacaactataatatttatgatcatccaaaagctgctgaagatcgtaaaaacactgttttatacttaatgcattatcataaacgcattacagataaacagtgggaagatgctaagaaaatcgatttaaaagcgaacttagtaaatcgtactcctgaagaacgtcaaaacattgatacaaatcaagattctgagtataattcatacgttaactttgtgaaatctgaattaatgaataataaagcattcaaagatgaaaatttaggtaatgtattacaaagtggtattaaaatttatacaaacatggataaagatgttcaaaaaacattacaaaatgatgttgataatggtagcttctacaagaataaagaccaacaagttggtgcaacgattcttgatagtaaaactggtggtttagttgctatatctggtggacgtgatttcaaagacgtcgttaacagaaaccaagcaacagatcctcaccctactggttcatctttaaaacctttcttagcgtatggacctgccattgaaaatatgaaatgggcaacaaaccatgcgattcaagatgaatcttcatatcaagttgacggttctacatttagaaactatgatacgaagagtcacggtactgtatctatttatgatgctttacgacaaagtttcaatatcccagctttaaaagcatggcaatcagttaagcaaaatgctggtaacgatgcacctaagaaattcgctgccaaacttggcttaaactacgaaggcgatattggtccatctgaagtacttggtggttctgcttcagaattctcaccaacacaattagcatcagcatttgctgcaatcgctaacggtggtacttataacaacgcgcattcaattcaaaaagtagttactcgtgacggtgaaacaatcgaatacgatcatactagccataaagcgatgagtgattacactgcatacatgttagctgagatgctaaaaggtacatttaaaccatatggttctgcatatggccatggtgtatctggagtaaatatgggtgctaagacaggtactggtacttacggtgctgaaacttattcacaatataatttacctgataatgcagcgaaagacgtgtggattaacggctttacacctcaatacactatgtcagtgtggatgggcttcagtaaagttaaacaatatggtgaaaactcatttgtgggacatagccaacaagaatatccacagttcttatatgaaaatgtgatgtcaaaaatttcatctagagatggcgaagactttaaacgtcctagctcagtaagtggtagtatcccatcaatcaatgtttctggtagtcaagataacaacactacaaatcgtagtacacacggtggtagtgacacatcagcaaacagcagtggtactgcacaatcaaataacaatactagatctcaacaatctagaaacagcggtggattaacaggtatattcaactaa

SEQ ID NO: 76 - DNA, 6025 bp, Staphylococcus aureus
atgaagataggtataacatgttacccgtccatgggtggttctggaattattgccacagaattaggaattaaattagcagagcgaggtcacgaagtacattttatcacttcaaatatcccgtttagaataagaaaaccattgccgaatatgatttttcatcaagttgaagtgaatcaatatgcagtatttcaatatccaccgtatgatattacgttaagtactaaaatcgctgaagttattaaagaatatgatcttgatttgttgcatatgcactatgctgtacctcatgcaatttgtggaattttagctcgtgagatgtcaggtaaagatataaaaattatgacaacgctacacggtactgatattactgttttgggctatgatcattcactccaaggtgcaattaaatttggcattgaaaaaagtgatattgtgacaagtgtgagtaaatctttagcgcaagaaacacatgaaattatcgaaactaacaaagaaattataccgatttataattttgtacgtgaaaatgagtttccaactaaacataacacagcattaaaatcacaatttggtatagcaccagatgaaaaagtgttaatacatgtatcgaattttagacaagtaaaacgcatagatactattatagaaacatttgcaaaagtacgtgaaaagatacctagtaaattaattttacttggagatggtcctgaattagtgccaatgcgtcaattgacgaaagagttaaacgtagaagaggatgttttatttttagggaaacaagattgtgtaagtgaattttatcaattatctgacttagtattattattaagtgaaaaagaaagctttggactaactttacttgaggctatgaaaacaggcgtcgttccaattggttcaaatgccggtggaattaaagaggttattaaacatggtgaaactggatttgttgtagatgtgggtgattgtgattcagcgagtgactatgctatccgtttacttgaagataaggcgttatacaacaaacttcagaaaaacatgctagcagatattgctgaacgttttggatcagaacttattacagatcaatatgagtattattatcaaaaaatgctaaatgagcataacaaaagtaaaggcgagtaataatatggataaatcattatttgaacaggcaaggcctatattagaacaaattcaagacaatggttttgaagcatattatgtaggtggctctgtaagagattatgtcatgggaagaaatattcatgatatagatatcacaacaagtgcaacgccggatgaaatagaatctatctttagtcatacgatacctgtaggtaaagaacatggcaccataaatgtagtttttaatgatgaaaattatgaagtgacaacattccgggctgaagaagattatgtcgatcaccgtagaccaagtggtgttacatttgttcgggatttatacgaagatttgcaacgaagagatttcacgatgaatgcgatagcaatggatacagcatacaaattgtatgattattttgatggtcaacaagatattaataatcgaataataagaactgtaggtatagctgaggaacgattccaagaagatgctttacgtatgattcgatgtttaagattccagtcacaattatcatttgatattgcaatggaaacatttgaagcgatgcgtacacaaatggcagatattaaatttttatcaattgagcgtatagtgattgaactaactaaattaatgcgaggtattaatgttgaagagagttttaatcatttaaaatcgctgaaagcatttaattatatgccatatttcgaacaacttgatatgaatcaaattaatgtaactgaaccaattgatttagaattgttgattgctatagtgtcagttaaatttgatattaattactcattgaagcctttaaagctaagtaaccgacaagtaaaagatatcaatcaatatattcaaattatgaatgcattaccaagtattattacaaaagaacaattaaaaatgtttgtttatgattatgatacgaatctcattaaaaatgtaatggttgcagcagacgtgttaaaggcaaatgatattcaaggacatgaaccattaatcgttaaccttcaaacgattgatgaaacattacatcgtttacctatgcataatagaaaagacatgatggttaatggcggtgtacttatggcacatttaaatgccaaaagtggtccgtggttaaaagatgtgctaagacaaattgagatagcgattgtaacaggtaaagtaagcaacgaagaaactgaaattttgaaatgggtggataatcatgtcaaaatatagtcaagatgtacttcaattactctataaaaataaaccgaattatatatctggacaaagcattgcggaatcacttaatatttcacgcactgcagtaaaaaaggtgattgaccaattaaagttagagggatgtaaaattgattcagtaaatcataaagggcatttattacaacaactcccagatatttggtatcagggtataatagaccaatatacaaaaagttctgctttgtttgattttagtgaagtatacgattcaatagattctacacaacttgctgcgaaaaagtcacttgttggaaatcaatcttcattttttatcttgagtgatgaacaaacgaaaggtcgtgggcgatttaatagacattggagttcttcaaaagggcaaggactttggatgtctgtcgtgttaagacctaacgttgcattctcaatgatatctaaatttaatttatttattgcattagggataagagatgcgattcaacattttagtcaagatgaagtcaaagtgaaatggccgaatgatatatatattgataatggtaaagtgtgtggtttcttaactgaaatggttgctaataatgatggtatagaagcaataatatgtggtataggtattaatttgacgcaacaactagaaaactttgatgaaagtattagacatagagcaacaagtatacaattacatgataaaaataaattagatagatatcaatttttagagagattacttcaagaaattgaaaaaagatataatcaatttttaacgttacctttttctgaaattcgtgaagaatatattgcagcttctaatatttggaatagaacgttgctatttacagaaaatgataaacagtttaaaggacaagcaattgatttagattacgatggctatctaattgttagagatgaagcgggtgaatcacaccgtttaattagtgcagatatagatttttaacactaaagcaaggagagatagctatgggtatggcaacctatgccgttgtggatttggaaacaacaggcaaccaattagattttgacgatatcattcaaattggtataacgtttgtgcgcaataaccaaattattgatacatatcattctatgattagaacaaatttagagattccgccgttcattcaagcgttaacatccattgaagaaaatatgctacaacaagcgccatattttaatcaagttgcacaagaaatctacgataagataaaagattgcatttttgtcgctcataatgtagattttgatttgaattttattaaaaaggcatttaaagattgtaatattcaatatcgtcccaaaaaagttatagatacactagaaatctttaaaatagcttttcctacagataaaagctatcaattaagtgaattagcagaggcacatggtattaccttagcaaatgcccatcgagctgacgaagatgccgctactactgctaaattgatgatattagcttttgaaaaatttgaaaagttaccgttagatactttgaagcaattatattatttaagtaaacagttgaaatacgatttgtatgatattttctttgagatggttaggcaatatgatgcaaagccattggataaatcgtacgaaaagttcgaacagattatctatcgtaagcaagttgattttaaaaagccgacaacaaattataatggcagcttgaagtctttatatagcaaagctgtagatcaacttggcttaacatatcgaccgcaacaattatatttagcggaaactatattagatcagctcatgcatagtgaaaaagcaatgattgaagcatcactaggcagtggtaaatcattagcatatttacttgcggccttgatgtataatattgaaactgggaagcatgtcatgatttctaccaatactaaattactgcaaagtcaattgttagaaaaagatattccagcaatgaatgaagcgttaaattttaaaattaatgcactattgattaaaagtaaaagtgattacatttcattgggacttattagtcaaattttaaaagatgacacaagtaattacgaagtgaatatcttgaaaatgcaattgttaatttggattacagagacgccgtccggagatatacaggaattaaatttaaaaggtggtcaaaagatgtattttgaccagaaaattgaaacatatgtaccggcacgtcacgatgttcattattataattttattaagcgaaatgcacagaacattcaaattggtattacaaatcatgcacatttaattcattctgatgttgaaaattcaatatatcaattgtttgatgattgtatagtggatgaagcacatcgcttaccagactatgccttaaatcaagtgacaaatgagttgagttatgctgatattaaatatcagcttggtttgattggtaaaaacgaaaatgaaaaattgttaaaggcaatcgatcaactggaaaagcagcgaattttggaaaaattagatattgcaccaattgatatttttggcttgaaggctagtatgaatgagattcatgagttaaatgagcaattgttctcaacgatatttacgattatcaatgattctgatgtttatgatgatgatattcatcgcttccataatgtatttacttttgaaacaaaagacattttgaaggatttacatgcgattatcgataagttaaataaaacgctagaaatattcaatggcattagtcataaaacagttaaatcattacggaaacagttgttgtatttaaaagataaatttaaaaatatcgaacaaagtttaaaagctggacatactagtttcatttcaattaaaaatttatctcaaaaatcaacaatacgtttatatgtgaaagattacgctgtaaaagatgtattaacgaaacaagtattggaaaaatttaaatcactcatttttatatctggtactttaaaatttaatcattcgtttgaagcttttaaacagttattcaacaaagatgttcactttaatacatttgaagttaacacgtcgttacaaagtgcaaaaaatacaagtgtatttataccgagtgatgtagcatcttatcaatataaaaatatagatgagtatgtagcatcgattgtaagctatattattgaatatacgactataacgtcatcaaaatgtttagtcttatttacgagttataaaatgatgcatatggtacaagatatgctaaatgaattgccagaatttgaagattatgttgtattaacacaacagcagaaccaaaattataaaatagtacaacagtttaataattttgataaggccatactgcttggtacgtcaacattttttgaaggttttgattttcaagcaaatggtattaaatgtgtgatgatagcgaagttaccgtttatgaacaagcataatgcaaaatattggcttatggattctgaattcacttcaactttcaaggaatatgtattacctgatgcagttacacgttttagacaaggacttggaagattaattagaaatgaaaatgatcgcggcataatagtttcatttgatgatcgactcataaacagtaattataaaaacttttttgaacaaacacttgaaaattatcgtcagaaaaaaggcgacattcaacagtttggaaaattattaagacaaattcaaaaaaagaaaaagtga

SEQ ID NO: 77 - DNA, 3212 bp, Staphylococcus aureus
atggaaacaactgttagcaaattggaaagacaaatagaagaaagattaaagggtgtatcagaatatgaatccattaatattaatcatcggttaggtaagttacttgattcatatgatattccagatgttgccaaagtagcatgcctcacaattgacacatcaatgagacaccttgatgacattacatataatcatttgtctaaacattccattttgattggagatttaattagtgcacatttttatacgctactagcagaaatcaatgatttatcatttcaaaatgaaattagtaaagcaattgttgaaattaatgaattgaaatcttcattacatcatcaagctttaaatgattatgaaatttctcaagcaatagtaaaaattgaaacacttttcccatatattacgttatctcatttcggtatcaatattgatgagtcggaaatatataattatttatttgaagatatgtctgattactatccatcatacttcaagaaatataatcaaagtgaagtaaagcattacttacacgatatccaaaaaagttatttaaaaagtagaggtaattaagcatggctgacaataaagcaaataaagagcaagtacatcgcgtttttcaaaatatttcaaaaaaatatgatagattaaataatattattagttttgagcagcataaagtatggagaaaacgcgtcatgaaagacatgggtgttagaaaagggacgaaagcattagatgtttgttgtggtactggtgattggacaatcgcattaagcaaagctgtaggaccaacaggtgaagttactggtattgactttagtgagaatatgttagaagtaggaaaagaaaaaactgcttcaatggaaaatgttaaacttgttcatggtgatgcaatggaattgccgtttgaagacaattcttttgattatgtaacaattgggtttggattaagaaatgtgccagactatttagtcgcgttaaaagaaatgaatagagtacttaaaccaggtggtatggtggtatgtcttgaaacgagccaaccaactttgccagtctttaaacaaatgtatgcactatactttaaatttgttatgcctatttttggaaaattatttgcaaaatcaaaagaagaatatgaatggttacagcaatctacgtttaattttcctggaaaagaagagttgaagcgcatgtttgaagaagcaggtttcataaatgtaagagtacgtagttttacagggggcgttgctgcaatgcaccttggctataaagaaaaagataataccaaaggtgattaacgtggcaaagttaaacatgaacaatgaaattaagaaagtggaacaacgacttgaaaaggcaataaaaagtaaagattctgtattagaacaggcatcattacacttattgtcttctggtggtaaaagagtacgcccagcatttgttattctgagtagccaatttggcaaagatgaacaaacgtctgaacaaacgtatcaagttgcagtcgcattagagttaattcatatggcaacacttgttcatgatgacgttattgataaaagcgacaagcgtcgaggcaagttaaccatatcaaagaaatgggatcagacaactgctattttaactgggaattttttattggcattaggacttgaacacttaatggccgttaaagataatcgtgtacatcaattgatatctgaatctatcgttgatgtttgtagaggggaacttttccaatttcaagaccaatttaacagtcaacagacaattattaattatttacgacgtatcaatcgcaaaacagcactgttaattcaaatatcaactgaagttggtgcaattacttctcaatctgataaagagactgtacgaaaattgaaaatgattggtcattatataggtatgagcttccaaatcattgatgatgtattagacttcacaagtaccgaaaagaaattaggtaagccggtcggaagtgatttgcttaatggtcatattacgttaccgattttattagaaatgcgtaaaaatccagacttcaaattgaaaatcgaacagttacgtcgtgatagtgaacgcaaagaatttgaagaatgtatccaaatcattagaaaatctgacagcatcgatgaggctaaggcagtaagttcgaagtatttaagtaaagctttgaatttgatttctgagttaccagatggacatccgaaatcactacttttaagtttgacgaaaaaaatggggtcaagaaacacatagtatttatgaaaagtattgaaagcgctttatcaacctgttaatatataatagtaatatacataaacctattaaacacagggggatacataaagtggaacgtacatttttaatgattaaaccagacgcagtacaaagaaatctaattggtgaagtaatttcaagaattgaaagaaaaggactaaaacttgtcggtggtaaattaatgcaagtaccaatggaacttgctgaaacacattatggtgaacaccaaggcaaaccgttttataatgatttaatttcatttattacatcagcaccagtgttcgcaatggtagttgaaggtgaagatgcagttaatgtatctagacatattattggcagcaccaatccttcagaagcttcaccaggatcaattagaggtgatttaggtttaactgttggtagaaatatcattcacggttcagattcattagagtctgctgaacgtgaaattaatctatggtttaatgaaaatgaaattactagctatgcttcaccacgtgatgcatggttatatgaataaaatataaactgtaaacctttacgatttatttataaaggtagaaagggttttgttatgtggttagtcattatgattatacataacaaggcccgttttttatgttgtagtaaattacttgaaaaattttatagttttttggtaacacgtattaaaaagagaggaatattctttatcaaatgaaactaaacagagagaaggggttgttaaaatgaagaatattatttcgattattttggggattttaatgttcttaaaattaatggaattactatatggtgctatatttttagataaaccacttaatcctataacaaaaattatttttatactgactctcatttatattttttatgtattagtaaaagaattgattatatttttgaagtcaaagtataacaaaagcgcttaa

SEQ ID NO: 78 - DNA, 3723 bp, Staphylococcus aureus
atgactgaagaattcaatgaatcaatgattaacgatattaaagaaggtgacaaagtcactggcgaggtacaacaagttgaagacaagcaagttgttgttcatatcaacggtggtaaatttaatgggattattcctattagtcaactatctacgcatcatattgatagcccaagtgaagttgtaaaagagggcgacgaagttgaagcatatgtcactaaagttgagtttgatgaagaaaatgaaactggagcttacatcttatctagaagacaacttgaaactgagaagtcttatagttatttacaagaaaaattagataataatgaaatcatcgaagcgaaagtaacagaagtagttaaaggtggtttggttgttgatgtaggacaaagaggttttgttccggcttcactaatttcaacagacttcattgaggatttctctgtgtttgatggacaaacaattcgtattaaagttgaagaattggatcctgaaaataatagagtcattttaagccgtaaagcagttgaacaagaagaaaacgatgctaaaaaagatcaattattacaatctttaaatgaaggcgatgttattcatggtaaagtagcgcgtttaactcaatttggtgcatttatagacattggtggtgttgatggtttagtgcatgtatctgaactttctcacgaacatgttcaaacaccagaagaagtagtttcaattggtcaagatgttaaagttaaaattaaatctattgatagagatacagaacgtatttcattatcaatcaaagatacgttaccaacacctttcgaaaatattaaaggtcaattccacgaaaatgatgtcattgaaggtgtcgtagtaagattggcaaactttggtgcatttgttgaaattgcaccaggtgtacaaggacttgtacatatttctgaaattgcacacaaacacattggtacgccaggtgaagtgttagaacctggtcaacaagtaaatgttaaaatattaggtattgatgaagagaatgaaagagtatcactatctattaaagcaacattaccaaacgaagatgttgttgaaagtgatccttctacgactaaggcgtacttagaaaacgaagaagaagataatccaacaattggcgatatgattggtgataaacttaaaaatcttaaactataatttaatatttaatagtcaactccacatgtttatgattgcatgtggagtatttttatgtaacaaaatatactcggaatgataacgtggacaaatttaactaagtgtttaaaaagataaagttttaagtgctgatttttatcattacagtaataaactcattttgaatacacagtctcatgtgatattattaaaaagatataagaaagagaggaagttagcttatgactaaacctatagtagctattgtaggtaggcctaatgtaggtaaatctacaatttttaatagaatagttggagaacgtgtttcgattgtggaagacacgccaggtgtaacacgagatcgtatttattcttcaggtgaatggttaacacatgatttcaatattattgatacaggtggtattgaaattggtgatgcaccattccaaacacaaattagagcgcaggcagaaatcgccatagatgaagcggatgttattatttttatggttaacgtgcgtgaaggattgacacaaagcgatgaaatggtcgctcaaattttatacaaatctaaaaaaccggtcgtattagcggttaacaaagtagataatatggaaatgcgtacagacgtgtatgatttctattcattaggatttggtgaaccgtatccgatatcagggtcacatggtttaggtcttggtgacttgttagatgcagttgtttctcattttggtgaagaggaagaagatccttatgatgaagatacaattcgactatccattattggacgaccaaacgtaggtaaatcaagtttagtaaatgctattttaggtgaagatcgcgttatcgtttctaatgttgcagggacaacgagagacgctattgatacagagtatagttatgatggacaagattatgttttaatcgatactgctggtatgcgtaaaaaaggaaaagtatatgaatcaactgagaaatattcagtactaagagctttaaaagcgattgaacgttcaaatgttgttttagtggtcattgatgcagaacaaggcatcattgaacaagataaacgtgttgcaggatatgcacatgaacaaggtaaagcagtcgtgattgtcgtaaataaatgggatactgtggaaaaagatagtaaaacgatgaagaaatttgaagatgaagtacgtaaagaattccaatttttagattatgcacaaattgcttttgtgtctgctaaagaacgcacaagattacgtacattattcccttacattaatgaagcaagtgaaaaccataaaaaacgtgttcaaagttcaactttaaatgaagttgttactgatgcaatttccatgaaccctacaccaacagacaaaggtagacgtttgaatgtcttttatgcaacacaagttgctatagaaccaccgacatttgttgtatttgttaatgatgtagaattaatgcatttttcttataaacgctatttagagaatcaaatccgtgccgcttttggttttgaaggtacaccaattcatattatagctcgaaagagaaattaacgattgggggataacaatgactaaaattaccgtttttggtatgggaagttttgggacagcccttgccaatgttcttgcagaaaatggacatgatgttttgatgtggggtaaaaatcaagatgctgttgatgaattaaatacatgtcatacaaataaaaagtatttaaaatacgcgaaattagatgttaacatcatcgctacttcagatatgaccaaagcaattcaatttgcagatatttacttaatggctttacctactaaagcaatgcgagaagttgctactcaaattaatgataagctgacctctaaaaagacttttatacatgttgctaaaggtattgaaaatgggacgtttaaacgtgtgtcagaaatgattgaagattctatttcacccgaatataatgcaggtattggcgtgttgtcagggccaagtcatgcggaagaagttgtagtcaagcaaccaactacagttgctgcatcatcaaaagataaaagtgtaagtaaattaacgcaagatttatttatgaatgattatttgcgtgtgtacacgaatgatgacttgattggtgttgaacttggtggtgcattgaaaaatatcatcgcagtagcaagtggtatcgtagctggaattggctacggtgataatgcaaaagctgcgttaatgactcgtggtttagcggaaattagtagattaggtgaaaagttaggtgccgatcctatgacatttctaggtttaggtggtatcggtgacttaatcgttacttgcatatcaacacattctcgaaatttcacattaggatataaacttggacaaggtgaatcaatggatcaagcattatctgaaatgaatatggttgttgaaggtatttatacaactaaatcagtttatcatttagctaaagaaaaaaatgtggatatgccaattacaaatgcattatatagagtattatttgaaaatatctcagtaaaagaatgcgtaaaagatttaatggagcgcgataaaaaatctgaataa

SEQ ID NO: 79 - DNA, 2326 bp, Staphylococcus aureus
atgactaaacctatagtagctattgtaggtaggcctaatgtaggtaaatctacaatttttaatagaatagttggagaacgtgtttcgattgtggaagacacgccaggtgtaacacgagatcgtatttattcttcaggtgaatggttaacacatgatttcaatattattgatacaggtggtattgaaattggtgatgcaccattccaaacacaaattagagcgcaggcagaaatcgccatagatgaagcggatgttattatttttatggttaacgtgcgtgaaggattgacacaaagcgatgaaatggtcgctcaaattttatacaaatctaaaaaaccggtcgtattagcggttaacaaagtagataatatggaaatgcgtacagacgtgtatgatttctattcattaggatttggtgaaccgtatccgatatcagggtcacatggtttaggtcttggtgacttgttagatgcagttgtttctcattttggtgaagaggaagaagatccttatgatgaagatacaattcgactatccattattggacgaccaaacgtaggtaaatcaagtttagtaaatgctattttaggtgaagatcgcgttatcgtttctaatgttgcagggacaacgagagacgctattgatacagagtatagttatgatggacaagattatgttttaatcgatactgctggtatgcgtaaaaaaggaaaagtatatgaatcaactgagaaatattcagtactaagagctttaaaagcgattgaacgttcaaatgttgttttagtggtcattgatgcagaacaaggcatcattgaacaagataaacgtgttgcaggatatgcacatgaacaaggtaaagcagtcgtgattgtcgtaaataaatgggatactgtggaaaaagatagtaaaacgatgaagaaatttgaagatgaagtacgtaaagaattccaatttttagattatgcacaaattgcttttgtgtctgctaaagaacgcacaagattacgtacattattcccttacattaatgaagcaagtgaaaaccataaaaaacgtgttcaaagttcaactttaaatgaagttgttactgatgcaatttccatgaaccctacaccaacagacaaaggtagacgtttgaatgtcttttatgcaacacaagttgctatagaaccaccgacatttgttgtatttgttaatgatgtagaattaatgcatttttcttataaacgctatttagagaatcaaatccgtgccgcttttggttttgaaggtacaccaattcatattatagctcgaaagagaaattaacgattgggggataacaatgactaaaattaccgtttttggtatgggaagttttgggacagcccttgccaatgttcttgcagaaaatggacatgatgttttgatgtggggtaaaaatcaagatgctgttgatgaattaaatacatgtcatacaaataaaaagtatttaaaatacgcgaaattagatgttaacatcatcgctacttcagatatgaccaaagcaattcaatttgcagatatttacttaatggctttacctactaaagcaatgcgagaagttgctactcaaattaatgataagctgacctctaaaaagacttttatacatgttgctaaaggtattgaaaatgggacgtttaaacgtgtgtcagaaatgattgaagattctatttcacccgaatataatgcaggtattggcgtgttgtcagggccaagtcatgcggaagaagttgtagtcaagcaaccaactacagttgctgcatcatcaaaagataaaagtgtaagtaaattaacgcaagatttatttatgaatgattatttgcgtgtgtacacgaatgatgacttgattggtgttgaacttggtggtgcattgaaaaatatcatcgcagtagcaagtggtatcgtagctggaattggctacggtgataatgcaaaagctgcgttaatgactcgtggtttagcggaaattagtagattaggtgaaaagttaggtgccgatcctatgacatttctaggtttaggtggtatcggtgacttaatcgttacttgcatatcaacacattctcgaaatttcacattaggatataaacttggacaaggtgaatcaatggatcaagcattatctgaaatgaatatggttgttgaaggtatttatacaactaaatcagtttatcatttagctaaagaaaaaaatgtggatatgccaattacaaatgcattatatagagtattatttgaaaatatctcagtaaaagaatgcgtaaaagatttaatggagcgcgataaaaaatctgaataa

SEQ ID NO: 80 - DNA, 2608 bp, Staphylococcus aureus
atgattaatgagcaaagattacttaatacgtttttagaacttgtacaaatcgattctgagacagggaatgaatcaacaatccaacctattttaaaagaaaaattcatagcattagggttagatgttaaagaagatgaagcggctaaacatcctaaattaggtgccaataatctagtgtgtacaatgaatagtactatcgaagaaggcgaagtacctaaattatatttgacgagccatatggatactgttgtacccgcaattaatgtaaagccaattgtaaaagatgacggctacatatactctgatggtacgactattctaggtgcagatgataaagcaggattagcagcgatgcttgaagttttgcaagtgataaaggaacaacaaatcccacatggacaaattcaatttgtgattactgttggggaagaatcaggtttaattggtgctaaagaattaaattcagagttgttggacgcggactttggttatgctattgatgcaagtgctgatgtcggtactacggttgtaggtgcaccgacgcaaatgttaatttcagctaaaattattggcaaaacagctcatgcaagtacgccaaaagagggtgttagtgctattaatattgcggctaaagcaattagtcgaatgaaattaggacaagttgatgaaataactactgccaatattggtaagtttcatggcggttcagctacgaatattgttgcagatgaagtcattttagaagcagaggcacgttctcacgatccagaaagaataaaaacacaagtcaaacatatgactgatgtgtttgaaactactgcatcagaattaggtgggaaagcagaagttacagtggagcaaagttatccaggatttaaaattaatgataatgaagcggttgttaaaattgcacaagaaagtgctcgtaatttaggattatctgcaaatacaattatttctggtggcggttcagacggcagtattattaatacatttggtattccttcagtcattttaggagtgggttatgaaaaaatccatacaacaaatgagagaatgccgattaaatcattgaacttgcttgcaagtcaagtgttagaaataatcaaaatagttgcgcgacaatcgaaatgatttagtgtagtgtatgtctattttgtgatacaatactaatgaaaaatcaacaagtgaggtaagtaatatgacacaacaaattggagttattggtttagccgttatgggtaaaaacctagcttggaatattgaatcacacggatatagtgtatctgtatttaaccgctcaagtgaaaaaactgatttaatggttgaagaatcaaaagggaaaaatattcatccaacgtattcattggaagaatttgttaattctttagaaaaaccacgtaaaattttattaatggttcaagcaggtaaagctacggatgcaacaattgatagtttgttacctttattagatgatggagatattttaattgatggtggtaatacaaactatcaagatactatcagacgtaataaagcattagcacaaagtgcaatcaactttattggtatgggcgtttctggtggtgaaattggagcgttaactggtccgtcattaatgccgggtggacaagaagaagcttataacaaagttgcagatattcttgatgcaattgctgctaaggcaaaagacggtgcttcatgtgttacttatattggaccaaatggtgctggacactatgtgaaaatggtacataatggtattgaatatgctgacatgcaattaattgcagaaagttatgctatgatgaaagaattattaggtatgtctcatgaagacattgctcaaacgttcaaagactggaatgctggtgaattagaaagttatttaattgaaatcactggtgatattttcatgaaattagatgaaaataaagaagcattagttgaaaaaattcttgatactgcaggtcaaaaaggtacaggaaaatggacttcaattaatgcattagaattaggtattccattaacaatcattactgaatctgtatttgcacgttttatctcttcaatcaaagaagagcgcgtaaatgcttctaaagaattaaatggtccaaaagcatcatttgatggtgacaagaaagactttttagaaaaaattcgtaaagcattatatatgagtaaaatttgttcttatgcacaaggtttcgcgcaaatgcgtaaagcaagtgaagataatgaatggaatttaaaacttggtgatttagctatgatttggagagaaggttgcattatacgtgcacaattcttacaaaagatcaaagatgcttacgataataatccaggattacaaaacttattgctagatccttactttaaaaacatcgttactgaatatcaagatgcgttacgtgatgttgtcgcaactggtgttcaaaatggtgtaccaacacctggtttctcatcaagtattaattactatgatagttaccgtgcagctgatttacctgcaaacttaattcaagcacaacgtgactacttcggtgctcacacgtacgaaagaaaagataaagaaggcgtattccatacacaatggattgaagaataa

SEQ ID NO: 81 - DNA, 4700 bp, Staphylococcus aureus
atgtcagagaaacaatatgatttagtcgttctcggtggaggtactgcaggatatgttgctgcgatacgtgcgtctcaattaggtaagaaagtggcaatagtagaacgacaactattaggaggtacttgtctccataaaggttgtattcctactaaatcgctgcttaaatctgctgaagtatttcaaacagtaaaacaggcagcaatgtttggcgttgatgtcaaagatgctaatgttaattttgaaaatatgttggcacgaaaagaagacattattaatcaaatgtatcaaggtgtaaagcatttaatgcaacacaatcacattgacatttataatggcacgggacgtattctaggtacatctatattttcacctcaaagtggcacaatttctgtcgaatatgaagatggtgaatcagacttattacccaaccaatttgtattaattgcaactggttcttcgcctgcagagttgccattcttatcatttgatcatgataaaattttatctagcgatgatatattatcattaaagacgttaccatcaagtattggtattattggtggtggtgttatcggaatggaatttgcatcattgatgatagatttaggtgttgacgtaacagttatagaagcaggtgaaagaattttaccaactgaaagtaaacaagcttcacaactattaaaaaaatcattgtcagcacgtggtgttaaattctatgagggaataaaactttctgaaaatgatataaatgttaacgaagatggtgttacgtttgaaatttcttcagacataattaaagtagataaagtgttgctatcgattggtagaaaacctaacacatcagatattggtttaaacaacactaaaataaaactttctacatcaggacatattttaacgaacgaatttcaacaaactgaagataaacatatttatgcagctggtgattgtataggaaaattacaattggcacatgttggatcaaaagaaggtgttgtggctgttgatcatatgtttgaggggaacccaatcccagtaaactataacatgatgcctaagtgtatttattcacaacctgaaattgcttctatcggtttaaacattgaacaagcaaaggcagagggaatgaaagttaaaagttttaaagtaccatttaaagcaattggtaaagcagtgattgatagccatgacgcaaacgaagggtatagcgaaatggtgattgatcaatcaactgaagaaattgtgggtattaatatgattggtccacatgtaacagaattgattaatgaggcatcactgttacagttcatgaatggctcggcattagaattaggactaacaacacacgcacatccttccatctctgaagtgttgatggaattaggattgaaagcagaaagtagagctattcacgtataaataggaggatttaacatgattgattataaatcattaggccttagcgaagaagacctaaaagtaatatataaatggatggatttaggtagaaaaatagatgaaagactgtggttattgaaccgtgcaggtaaaattccatttgttgtaagtggtcaaggacaagaagcaactcagattgggatggcatacgcattagaagaaggtgatattacagcgccttattatagagatctagctttcgttacttatatgggtatctcagcgtatgatacgtttttatcagcgtttggaaagaaagacgatgttaactctggtggaaaacaaatgccatcacactttagtagtagagctaagaatattttgtctcaaagttcaccggtagcaactcaaataccccatgctgttggtgctgctttagctttaaaaatggatggtaagaagaaaattgcaacagcaactgttggtgaaggtagctcaaaccaaggtgacttccatgaaggtttaaacttcgcgggtgtacacaaacttccttttgtatgtgtcattataaataataaatatgcaatttcagtacctgattcattacaatacgcagctgaaaaattatcggatagagcacttggttacggtatacatggtgaacaagtagatggtaatgatccattagcaatgtataaagcgatgaaagaagcaagagatcgagctatttctggtcaaggttcaactttgattgaagcagtaacaagtcgtatgacagctcattcatcagatgatgacgaccaatatcgtacgaaagaagagcgtgaagcgcttaaaaaagctgactgcaatgaaaagttcaaaaaagagttgctttcagctggcattatcgatgatgcttggttggcagaaatagaagcggagcataaagacatcatcaataaagcgacaaaggctgctgaagacgcgccatatccaagtgtcgaagaagcctatgcatttgtgtacgaagaagggagtcttaactaatggctaaattatcttatttagaggcgatacgccaggcacaagacttagcattacaacaaaataaagatgtgtttattcttggtgaagatgttggtaaaaaaggtggcgtatttggtactactcaaggactacaacaacaatatggtgaagacagagttatcgatacgccattagctgagtcaaatattgttggaactgccattggtgcagctatggtaggtaaaagaccaattgcagaaattcaatttgcagattttattttacctgcgacaaatcaaattattagtgaagctgcgaaaatgcgttatcgttcaaataatgattggcaatgcccattaacgattcgtgcaccatttggtggcggtgttcacggaggactatatcattcacaaagtattgaaagtatatttgcttcatcaccaggtttaacaattgttattccttccacaccgtatgatgctaaagggcttttattatcatctatcgaatcaaatgatccagtattgtactttgagcataaaaaagcttatcgtttcttaaaggaagaagtgccagaagaatattacactgtacctttaggaaaagcagatgttaaacgtgaaggtgaagatttaacagtattttgttatggattaatggtcaattattgtttacaagcagcggatattttagctgcagacggtatcaacgttgaagtcgttgatttacgaactgtttatccattagataaagaaacaattattgatcgtgctaaaaatacaggtaaagttttacttgtaactgaagataatttagaaggtagtattatgtcagaagtgtcagcgattattgcagagcattgcttgttcgatttagatgcaccaatcatgcgtttagctgctccagatgtaccatctatgccattttctcctgtattagaaaatgaaattatgatgaatccagaaaaaatcttaaataaaatgcgtgaattagcagaattctagggagggaaagtcatggaaataacaatgcctaagttaggtgagagtgttcatgaaggtaccattgaacaatggttagtttctgttggtgatcatattgatgaatatgaaccattatgtgaagttattacagataaagtgacagctgaagtcccttccacgatatcaggaacaattacagaaattttagttgaagcggggcagacagtagctattgatacaattatctgtaaaattgaaactgctgatgaaaagacaaatgaaacaactgaagagatacaagcaaaagtggatgagcatactcagaaatctactaaaaaagctagtgcaacagtggaacagacatttactgctaaacaaaatcaacctcgtaataatggtcgcttttcacctgttgtatttaaactcgcttcagagcatgacattgatttatcacaagttgtaggtagtggatttgaaggtcgtgtaactaagaaggatataatgtcagttattgaaaatggtggtaccacagctcaatctgacaaacaagttcaaacaaaatcaacatcagtagatacatcaagtaaccaatcatctgaagacaatagtgaaaacagcacaataccagtaaatggtgtgcgtaaagcaattgcgcaaaatatggttaatagtgtaacagagattccacatgcatggatgatgattgaagtagatgctacaaatcttgtgaatacgagaaatcattataaaaacagctttaaaaataaagaaggatataatctaacgttctttgctttctttgtaaaagctgtagcagatgctttaaaagcatatcctttattaaatagtagctggcaaggaaatgaaattgtcttacataaagacattaatatttcaattgctgttgctgatgaaaataaattatacgtacctgtgattaagcatgcagacgaaaagtcaatcaaaggtatagctagagaaattaatactttagcaacaaaagcgcgtaataagcaattgacaactgaagatatgcaaggtggaacatttacagttaataatactggtacatttggttcagtatcatcaatggggattataaatcaccctcaagcagcgatattacaagtagaatcaatcgttaaaaagccagtagtaattaatgatatgattgcaattcgaagtatggtaaatttatgtatttcaatagatcatcgcattttagatggtttacaaactggtaaatttatgaatcatattaaacagcgtatcgaacagtatactttagaaaatacaaatatatattag

SEQ ID NO: 82 - DNA, 5082 bp, Staphylococcus aureus
atgaactttaaagaaatcaaagaattaattgaaattctggataaatcaactttaacggaaatcaatattgaagatactaaaggcaaagtgacgcttaagaaagaaaaagaaactgagattatcacgccacaaatctcacaaatgccagttgaagctgcggcaatgcctatgcctcaagcacaatcaactgatagcaataaaactgaagctccaaagccaacttcagataatcacaaaacaattaatgcacctatggtaggtacattttacaaatcgccatctccagacgaagaagcatatgtgcaagttggggacactgtttcaaatgaaacaacagtgtgtattttagaggcaatgaaactatttaatgaaattcaagcagaaatttcaggtgaaattgttgaaatcttagtagaagacggacaaatggtagagtatggccaaccgttatttaaggtgaaataatgaaaaaggttttaattgcaaaccgcggtgaaatcgcagttaggattattcgcgcttgtcgtgatttaggcatccaaactgttgcaatctattctgaaggggataaagatgcgctacatactcaaattgctgatgaagcatattgcgtaggtcccactttgtctaaagattcatatttaaatattccgaacatcttatctattgcaacttctacaggttgtgatggcgttcatccgggttatggctttttagctgaaaatgctgactttgcagaattatgcgaagcatgccaattgaagttcattggaccaagttatcaatctatccaaaaaatgggtatcaaagatgttgctaaggcagaaatgatcaaagccaatgttccagttgttcctggtagtgacggtttaatgaaagacgtctcagaagctaagaaaatcgctaagaaaattggctatccggtcatcattaaagctactgctggtggtggcggaaaaggtatccgtgttgctcgtgatgaaaaagaacttgaaactggcttccgaatgacagaacaagaagctcaaactgcatttggtaatggtggactttatatggagaaattcatcgaaaacttccgccatattgaaatccaaattgttggggacagctatggtaatgtaattcatttaggagaacgtgattgtacaattcaaagacgtatgcagaaattagtggaagaagcaccttccccaattttagatgatgaaacacgtcgtgaaatgggaaatgccgcagttcgtgcagcgaaagctgtaaattatgaaaatgcgggaacaattgagtttatatatgatttaaatgataataaattttattttatggaaatgaatacacgtattcaagtagaacatcctgtaactgaaatggtaacaggaattgatttagttaaattacaattacaagttgctatgggtgacgtgttaccgtataaacaagaagatattaaattaacaggacacgcaattgaatttagaattaatgctgaaaatccttacaagaactttatgccatcaccaggtaaaattgagcaatatcttgcaccaggtggatatggtgttcgaatagagtcagcatgttatactaattatacgataccgccatattatgattcgatggtagcgaaattaatcatacatgaaccgacacgagatgaagcgattatggctggcattcgtgcattaagtgaatttgtggttcttggtattgatacaactattccattccatattaaattattgaataacgatatatttagaagcggtaaatttaatacaaactttttagagcaaaatagcattatgaatgatgaaggttaataggaggtcaatccatggtcaaagtaactgattattcaaattcaaaattaggtaaagtagaaatagcgccagaagtgctatctgttattgcaagtatagctacttcggaagtcgaaggcatcactggccattttgctgaattaaaagaaacaaatttagaaaaagttagtcgtaaaaatttaagccgtgatttaaaaatcgagagtaaagaagatggcatatatatagatgtatattgtgcattaaaacatggtgttaatatttcaaaaactgcaaacaaaattcaaacgtcaatttttaattcaatttctaatatgacagcgatagaacctaagcaaattaatattcacattacacaaatcgttattgaaaagtaatgtcatacctaattcagtaattaaataaagaaaaatacaaacgtttgaaggagttaaaaatgagtcgtaaagaatcccgagtgcaagcttttcaaactttatttcaattagaaatgaaggacagtgatttaacgataaatgaagcgataagttttattaaagacgataatccagatttagactttgaatttattcattggctagtttctggcgttaaagatcacgaacctgtattagacgagacaattagtccttatttaaaagattggactattgcacgtttattaaaaacggatcgtattattttaagaatggcaacatatgaaatattacacagtgatacacctgctaaagtcgtaatgaatgaagcagttgaattaacaaaacaattcagtgatgatgatcattataaatttataaatggtgtattgagtaatataaaaaaataaaattgagtgatgttatatgtcagattatttaagtgtttcagctttaacgaaatatattaaatataaatttgatcaagatccacatctccaatctgtattgattaaaggtgagctttcaaatttcaaaaagcattcaagtggtcatttatactttaatgtgaaagataaagagagcgttataagtgccatgatgttcaaaggtagtgcttctaaattaaacttcgaacctaaagaaggagatgaagtcttattagaagcacgtgtttctgtttttgaacgtcgtggaaactatcaaatttatgtaaataaaatgcaattagatggtatagggaacttatatcaaaaattagaagcattaaagaaaaaattaactgaagaaggttgttttgataaagcgaataagaaatcaatacctaagtttcctaaaaaaattgcagttttaacagcgagtacaggtgccgcaattcgagatatccattcaacgataaatagtcgttttccattagctgaacaaatacaaattagtactttggttcaaggtgaaaaagcaaaagacgacattattgaaaaaattgaatatgcagatagtttaggtgtagataccattattgtaggtcgaggtggtggatccatagaagatttatggaatttcaacgaagaagctgtcgtccgtgcaatatataattgtaagacaccgattatatcagcagtaggtcatgaaacagactttacattaagtgattttgctgcagacatcagagctgcgactccaactcaagctgctgttattgcaacaccagaccaatatgaattgctgcaacaaatacagcaatatcagtttacattgactcgtttcatcaagaaacatttagaacaacaacgtaaacatgttgaacatttgtcatcgtattacaagtttaaacaaccaactttattgtatgatcaacagatacaacgtcgagatgatttagaaaagagactgaaacaacaaattcaggcaacttttgaacaacagagacatcgattaatgctgttgcaacaacgttataatttaaaagcattactaagtagtgttaatcaagaacaacaaaataatcttcaattgacaaaccaacttgttaaattattgaattctaagatattaagttataaaaatgatttgaaaaataaagtagaaaacttaaacaatttaagtccaactaatacaatgttgcgtggatatgcaattgttaataaaaaagacgaagtcattacgagtactaaagatttaacagaaaatgatcaattgacgttaacaatgaaagatggcttagtagatgcaaaagttacgaaagtaaggtgtaataatgactaaagaaacgcaaagttttgaagaaatgatgcaagaattagagcaaattgttcaaaaattagataatgaaacagtatctttagaggaatcattagatttatatcaacgtggtatgaaactatcagcagcttgtgacacaactttaaaaaatgccgaaaaaaaggtgaatgacttaataaaagaagaagctgaggatgtaaaaaatgacgaatctaccgatgaataaattaatagatgaagtcaataatgaattatcggttgcgataaataaatcagtaatggatactcagctagaagaaagcatgttgtattcattaaatgctggaggtaaacgcatccgaccagttctgttattactcactttagattcactaaataccgagtatgagttaggtgtgaagagcgcaattgcactagaaatgattcatacatattcacttattcatgatgacctaccagcgatggataatgatgattatcgacgagggaaattaacaaatcataaagtatatggtgagtggactgcgatattagcaggtgatgctttattaactaaagcatttgaacttatttcaagtgatgatagattaactgatgaagtaaaaataaaagttctacaacggctgtcaatagcaagtggtcatgttggaatggtcggcggtcaaatgttagatatgcaaagcgaaggccaaccaattgatcttgaaactttggaaatgatacacaaaacaaaaacaggagcattattaacttttgcggttatgagtgcagcagatatcgctaatgtcgatgatgcaactaaagaacatttagaaagttatagttatcatttaggtatgatgttccagattaaagatgatttattagactgctatggtgatgaagcaaagttaggtaaaaaagtgggcagcgatcttgaaaataataaaagtacgtacgtgagtttattagggaaagatggcgcagaagataaattgacttatcatagagacgcagcagtggatgaactaacgcaaattgatgaacaattcaatacaaaacacttattagaaatcgttgatttattttatagcagggatcactaa

SEQ ID NO: 83 - DNA, 8932 bp, Staphylococcus aureus
atagaactcagtcaaagacaagaacgaatcatcgaaattgttaaaactaaaggacccattactggtgaacaaatagcagataagttgaatttaacaagagcaacgcttagaccagatttagcgatattaacaatgtcaggttttttagaagcgcgtccccgagttggatattattattcaggtaaatcaaaaggcaaattttttaatgaaaaacttcgacaatttgaggttaaggactatatgtctcaacctgttgtgctaagagagaatacaacagtttatgacgctatttgtacaatttttttagaagatgtaagtacattatttattattaatgaagataacgattttgttggtgtgtgttcaagaaaagatttattaagagcttcaatgattggagcagatattcatacagtacctatcagtgtaaatatgacacgtatgcctaatgtcacttatttagaggaaagcgaattagtcatatacgcagcagatagaatgattgaaaaagaaattgattcgattccaattgtaagaaaaaaagataatcaaaagtatgaagtaattggaagaatttccaaaacaacaatagctaagttattagtagcattatataaagaataggtgagaagtaatggaaaaaattaaaattatcgtagcctcagattctataggtgaaacggcagagttagttgctagggcaggtatttcacaatttaatcctaagcaatgtaaaaatgaattattaagatatccatatattgaatcttttgaagatgttgatgaagtgattcaagttgcaaaagatacaaatgctatcattgtttatacacttattaaacctgaaatgaagcaatatatgagtgagaaagtagcagaattccaattgaagtccgttgatatcatggggccattaatggatttattatcagcatcggttgaagaaaaaccttataatgagccaggtatcgttcatagattagatgatgcatatttcaagaaaattgatgcgatagagtttgcggttaaatatgatgatggtaaagatcctaaaggattacctaaagctgatattgttttacttggtatttcgagaacttcaaagacaccattatctcagtatttagcgcataagagttacaaagttatgaatgtaccgattgtaccagaagtgacaccgccagatggcttatatgatattgatcctaagaaatgtatcgcacttaaaataagtgaagaaaaattaaatcgcattagaaaagagcgattaaaacaattgggactaggtgacacagctcgttatgcaacagaagctcgaatccaagaagaattgaattactttgaagaaatcgtaagtgaaattggatgtcctgtcattgatgtttctcaaaaagcaatcgaagaaacagcaaacgatataatccattatattgaacaaaataaatcgaaatgatttcatttttgtcaaaaattaggtataatagtataactaatgcttaataggtgatttaatttgcgaatagatcaatcgatcattaatgaaataaaagataaaaccgacattttagacttggtaagtgaatatgtaaaactagaaaagagaggacgcaattatataggtttgtgtccttttcatgatgaaaagacaccttcatttacagtttctgaagataaacaaatctgtcattgttttggttgtaaaaaaggtggcaatgtttttcaatttactcaagaaattaaagacatatcatttgttgaagcggttaaagaattaggtgatagagttaatgttgctgtagatattgaggcaacacaatctaactcaaatgttcaaattgcttctgatgatttacaaatgattgaaatgcatgagttaatacaagaattttattattacgctttaacaaagacagtcgaaggcgaacaagcattaacatacttacaagaacgtggttttacagatgcgcttattaaagagcgaggcattggctttgcacccgatagctcacatttttgtcatgattttcttcaaaaaaagggttacgatattgaattagcatatgaagccggattattatcacgtaacgaagaaaatttcagttattacgatagatttcgaaatcgtattatgtttcctttgaaaaatgcgcaaggaagaattgttggatattcaggtcgaacatataccggtcaagaaccaaaatacctaaatagtcctgaaacgcctatctttcaaaaaagaaagttgttatataacttagataaagcacgtaaatcaattagaaaattagatgaaattgtattactagaaggttttatggatgttataaaatctgatactgctggcttgaaaaacgttgttgcaacaatgggtacacagttgtcagatgaacatattacctttatacgaaagttaacatcaaatataacattaatgtttgatggggattttgcgggtagtgaagcaacacttaaaacaggtcaacatttgttacagcaagggctaaatgtatttgttatacaattgccatctggcatggatccggatgaatacattggtaagtatggcaacgacgcatttactacttttgtaaaaaatgacaaaaagtcatttgcacattataaagtaagtatattaaaagatgaaattgcacataatgacctttcatatgaacgttatttgaaagaactgagtcatgacatttcacttatgaagtcatcaattctgcaacaaaaggctataaatgatgttgcgccatttttcaatgttagtcctgagcagttagctaacgaaatacaattcaatcaagcaccagccaattattatccagaagatgagtatggcggttatgatgagtatggcggttatattgaacctgagccaattggtatggcacaatttgacaatttgagccgtcaagaaaaagcggagcgagcatttttaaaacatttaatgagagataaagatacatttttaaattattatgaaagtgttgataaggataacttcacaaatcagcattttaaatatgtattcgaagtcttacatgatttttatgcggaaaatgatcaatataatatcagtgatgctgtgcagtatgttaattcaaatgagttgagagaaacactaattagcttagaacaatataatttgaatgacgaaccatatgaaaatgaaattgatgattatgtcaatgttattaatgaaaaaggacaagaaacaattgagtcattgaatcataaattaagggaagctacaaggattggcgatgtagaattacaaaaatactatttacagcaaattgttgctaagaataaagaacgcatgtagcatgtgattttaaagaataatacgaataatgattatgtcaaaatgtataagggtaaatgatagttaccgcatttaaacaacactattgaaaaataaatattgggattagttccaatttgtaaaataaaattaaaaatatggatgaattaattaagaatttagtttaaaatagcaatattgaataaatttcgaatgttcatatttaaaatcgggaggccgtttcatgtctgataacacagttaaaattaaaaaacaaacaattgatccgacattaacattagaagatgttaagaagcaattaattgaaaaaggtaaaaaagagggtcatttaagtcatgaagaaattgctgaaaaacttcagaattttgatatcgactctgatcaaatggatgatttctttgatcaattaaatgataatgatatttcactagttaatgaaaaagatagttcagatactgacgagaaactgaatccaagtgatcttagtgcccctccaggtgttaaaataaatgacccagttcgtatgtaccttaaagaaattgggcgtgttaacttattaagtgcacaagaagaaatcgaattagccaaacgtattgaacaaggtgatgaagtagcaaaatcaagacttgcagaagcgaacttacgtttagttgtaagtattgctaaaagatacgtaggtcgtggtatgttattccttgatttaatccaagaaggtaatatgggtcttattaaagctgttgaaaaatttgactttaacaaaggatttaagttttcaacatatgcaacatggtggattagacaagcaatcactcgtgcaattgctgaccaagcacgtacgattcgtatccctgtgcatatggtagaaacaattaataaattaattcgtgttcaacgtcaattattacaggacttaggtcgagatccagcaccagaagaaattggtgaagaaatggatttaccagcagaaaaagttcgtgaaattttaaaaattgcgcaagaacctgtttcattagaaacaccaattggtgaagaagatgatagtcatttaggagactttattgaggatcaggaagcacaaagtccttcagatcatgctgcttatgaattattaaaagagcaattagaagatgtgcttgatacattaactgatagagaagaaaatgtattacgattaagatttggtcttgatgacggcagaacaagaacacttgaagaagttggtaaagttttcggtgttacacgtgaacgtattcgacaaattgaagcaaaagcacttagaaaattaagacatccaagtcgtagtaaacgtttgaaagactttatggattaatttatatcaattttaatgattgataccaagacatgaataagcgcttatttatttttagattaagatttaacttgagtgaggttggtacattgaataatgttcaacctcttttttcataaaggagaataaaatgatttcgttaaataaccgattaacgacggtaagtcgatttttaaaacaaggtacaatcgcggatattggctcagatcatgcttatttgccaatctatgcaattcaaaaccatttatgcgaatgcggtattgctggagaagttattcaaggcccttttcaagctgctgtgaaaaatgtagctgcaaatcatttagtagaaagaattgatgtacgtttaggggatggcttaagtgttattcatcctgaggacgtaatcgataatatcacaatttgtggtatgggcggaccacttattgctaaaattttaaaagatgggcaagataagttaagtcaacatccaaggttgattttacaaagtaatatacaaactgaaaatttaagacaaacattacaacaattgaattatgaaataattgatgaaataataatggaagaaaaaggccatatttatgaaattgttgtagcagaacattctacacaattaatagagctatcatctgatgaattgaaattcggaccaaaattgctgaacaacaaaaatgaatattttataaaaaaatggcaaagagagttagaagcactttatcatattaaatcgaaactcaatactgaacaacatcatcaacgtttagctcaaattaatgacgaaattgctgtaattgaaagggtgttatagtaatgaaaatagctgatttaatgacattgttagatcatcatgtgccatttagtactgctgaatcttgggataatgtaggattgttaataggtgatggagatgttgaagttactggtgttttaacagcattagactgtacgttggaagtagtaaatgaagcaatcgaaaaaggttataatactattattagtcatcatcctctaatctttaaaggcgtaacatcattaaaagctaatggttatggtttgatcattagaaaactaattcaacatgacattaatttaatagcgatgcatacaaatttagatgtaaatccgtatggtgtcaatatgatgttggcgaaggcgatgggtttgaagaacatttcaataataaataatcaacaagatgtatactataaagttcaaacatatatacctaaggataatgttggaccatttaaagataagcttagtgaaaatggattagcgcaagaaggtaattatgaatattgtttctttgaaagtgaaggaagagggcaattcaaaccagttggtgaagctaatccaacaataggacaaattgataaaattgaagatgtagatgaagttaaaattgaatttatgatagatgcatatcaaaagtcaagggctgagcaattaattaaacaataccatccatatgaaacaccggtatttgattttattgagataaaacaaacatccctttatggacttggcgttatggcagaagtggataatcaaatgacattggaagatttcgcagctgatattaaatctaaattaaatatcccaagtgtccgttttgttggtgagtctaatcagaaaattaaacgtattgcaattattggtggttcaggtattggatatgaatatcaagctgtccaacaaggcgcagatgtctttgttacaggtgatattaaacatcatgatgccttagatgctaaaattcatggtgtgaatttaattgatattaatcattacagcgaatatgtgatgaaagaaggtttaaaaacgttactaatgaattggttcaatatagaaaaaataaatatagatgttgaagcatctacaattaatacagatccatttcaatatatttaaactaaaatctcgggatttctaaattttgaaatttcgaggttttaatatttttatttaaaatagcacatttatactttataatagtaaagatgaacatataaggaggccaaatcatggcaaaacatccattcgaacaatttaatctagaatctagtttaattgacgctgtgaaagaccttaattttgaaaaaccaactgaaattcagaatcgaattattccaagaatactaaagagaacaaatttaattggtcaatctcaaacgggtacagggaaatctcatgcatttttattaccattaatgcagttaattgatagtgaaataaaagaaccacaagcaatcgtagttgcaccaacaagagaacttgcacaacaactatacgatgcagcgaaccatttaagccaatttaaagctggtgtttcagttaaagtttttattggtggtacagatatagagaaagatagacaacgttgtaatgcacaaccacaattgattataggcacccctactagaattaatgacttagctaaaacgggacatttacatgtgcacttagcatcatatttagttattgatgaagcggatcttatgattgacttaggattaattgaagatgtagattacattgctgcaagattggaagataatgcaaatattgcggtgtttagtgctacaattccacaacagttacaaccatttttaaataaatatttaagtcatccagaatatgtagctgtcgacagtaaaaaacaaaataaaaagaacatcgaattctttttaatacctactaaaggtgcagctaaagttgaaaaaactttaaatttaattgatatactaaatccatacttatgtattattttctgtaatagtagagataatgcaaatgatttagcacgttcactaaatgaagctggtattaaagttggtatgattcatggtggtttaacgccacgtgaacgtaaacaacaaatgaaacgtatacgtaatttagaattccaatacgttattgccagcgatttagcatctcgtggtattgatattgaaggtgttagtcatgtcatcaattttgatgtgccaaatgatattgacttctttacgcatagagttggacgaactggtcgtgggaattataaaggtgtagcaattacgctttatagtcctgatgaagaacacaatatttcattaatagaagatcgcggttttgtattcaatactgttgatattaaagatggtgagttaaaagaagttaaagcgcacaatcagcgtcaagcaagaatgcgcaaagatgaccatttaactaatcaagtgaaggacaaagttcgaagtaaaattaaaaacaaagttaaaccaggttataagaagaaatttaaacaagaagttgaaaaaatgaaacgtcaagagcgtaaacaatttagtaagcagcaaaatagacaaaaacgtaagcaaaacaaaaaaggttaggtgtgttttatgttattaggatcacatgtttcaatgagtggtaaaaagatgttagaaggttctgctatagaagcgtatgaatatggtgaaacaacatttatgatttatactggtgcacctcaaaacacgcgccgtaaaagtattgaagatttaaatataactaaaggtcatgaagtgatggaaaaatatggcttatctaatattgttgttcatgcaccatacatcattaatattgcaaatacaaccaaaccagaaacgtttaatcttggtgtagatttcttgcaacaagaaattgaaagaacgcaagctataggcgctaaagatattgtattacatccaggtgcgcatgttggagctggtgttgatgccggaattaataagattattgaaggattaaatgaagttttaacgaatgacaataatgtacgtattgcgcttgaaacgatggcaggtaaaggtacagagattggtcgctcgtttgaagagttagcacgtattattgatggagttcataataacgaacgtttatcagtatgttttgatacatgtcatacgcatgatgctggatataatgtgaaagaggactttgatggcgtattaaatgaatttgataaaattattggagtcgacagaatcaaagttgttcatgtcaatgattctaaaaatgaccgtggcgctcaaaaagaccgacatgaaaatattggcttcggttacattggttttgatgcattaaattacattgtgcatcatgatagttttaaagatattccgaaaatcttagaaacaccttatgttggtgaagataagaaaaataaaaaaccgccatataaacttgaaattgaaatgttaaaacaacagcaatttgacccagaattaaaaaataaggttatgcaacaataa

SEQ ID NO: 84 - DNA, 4661 bp, Staphylococcus aureus
atagaactcagtcaaagacaagaacgaatcatcgaaattgttaaaactaaaggacccattactggtgaacaaatagcagataagttgaatttaacaagagcaacgcttagaccagatttagcgatattaacaatgtcaggttttttagaagcgcgtccccgagttggatattattattcaggtaaatcaaaaggcaaattttttaatgaaaaacttcgacaatttgaggttaaggactatatgtctcaacctgttgtgctaagagagaatacaacagtttatgacgctatttgtacaatttttttagaagatgtaagtacattatttattattaatgaagataacgattttgttggtgtgtgttcaagaaaagatttattaagagcttcaatgattggagcagatattcatacagtacctatcagtgtaaatatgacacgtatgcctaatgtcacttatttagaggaaagcgaattagtcatatacgcagcagatagaatgattgaaaaagaaattgattcgattccaattgtaagaaaaaaagataatcaaaagtatgaagtaattggaagaatttccaaaacaacaatagctaagttattagtagcattatataaagaataggtgagaagtaatggaaaaaattaaaattatcgtagcctcagattctataggtgaaacggcagagttagttgctagggcaggtatttcacaatttaatcctaagcaatgtaaaaatgaattattaagatatccatatattgaatcttttgaagatgttgatgaagtgattcaagttgcaaaagatacaaatgctatcattgtttatacacttattaaacctgaaatgaagcaatatatgagtgagaaagtagcagaattccaattgaagtccgttgatatcatggggccattaatggatttattatcagcatcggttgaagaaaaaccttataatgagccaggtatcgttcatagattagatgatgcatatttcaagaaaattgatgcgatagagtttgcggttaaatatgatgatggtaaagatcctaaaggattacctaaagctgatattgttttacttggtatttcgagaacttcaaagacaccattatctcagtatttagcgcataagagttacaaagttatgaatgtaccgattgtaccagaagtgacaccgccagatggcttatatgatattgatcctaagaaatgtatcgcacttaaaataagtgaagaaaaattaaatcgcattagaaaagagcgattaaaacaattgggactaggtgacacagctcgttatgcaacagaagctcgaatccaagaagaattgaattactttgaagaaatcgtaagtgaaattggatgtcctgtcattgatgtttctcaaaaagcaatcgaagaaacagcaaacgatataatccattatattgaacaaaataaatcgaaatgatttcatttttgtcaaaaattaggtataatagtataactaatgcttaataggtgatttaatttgcgaatagatcaatcgatcattaatgaaataaaagataaaaccgacattttagacttggtaagtgaatatgtaaaactagaaaagagaggacgcaattatataggtttgtgtccttttcatgatgaaaagacaccttcatttacagtttctgaagataaacaaatctgtcattgttttggttgtaaaaaaggtggcaatgtttttcaatttactcaagaaattaaagacatatcatttgttgaagcggttaaagaattaggtgatagagttaatgttgctgtagatattgaggcaacacaatctaactcaaatgttcaaattgcttctgatgatttacaaatgattgaaatgcatgagttaatacaagaattttattattacgctttaacaaagacagtcgaaggcgaacaagcattaacatacttacaagaacgtggttttacagatgcgcttattaaagagcgaggcattggctttgcacccgatagctcacatttttgtcatgattttcttcaaaaaaagggttacgatattgaattagcatatgaagccggattattatcacgtaacgaagaaaatttcagttattacgatagatttcgaaatcgtattatgtttcctttgaaaaatgcgcaaggaagaattgttggatattcaggtcgaacatataccggtcaagaaccaaaatacctaaatagtcctgaaacgcctatctttcaaaaaagaaagttgttatataacttagataaagcacgtaaatcaattagaaaattagatgaaattgtattactagaaggttttatggatgttataaaatctgatactgctggcttgaaaaacgttgttgcaacaatgggtacacagttgtcagatgaacatattacctttatacgaaagttaacatcaaatataacattaatgtttgatggggattttgcgggtagtgaagcaacacttaaaacaggtcaacatttgttacagcaagggctaaatgtatttgttatacaattgccatctggcatggatccggatgaatacattggtaagtatggcaacgacgcatttactacttttgtaaaaaatgacaaaaagtcatttgcacattataaagtaagtatattaaaagatgaaattgcacataatgacctttcatatgaacgttatttgaaagaactgagtcatgacatttcacttatgaagtcatcaattctgcaacaaaaggctataaatgatgttgcgccatttttcaatgttagtcctgagcagttagctaacgaaatacaattcaatcaagcaccagccaattattatccagaagatgagtatggcggttatgatgagtatggcggttatattgaacctgagccaattggtatggcacaatttgacaatttgagccgtcaagaaaaagcggagcgagcatttttaaaacatttaatgagagataaagatacatttttaaattattatgaaagtgttgataaggataacttcacaaatcagcattttaaatatgtattcgaagtcttacatgatttttatgcggaaaatgatcaatataatatcagtgatgctgtgcagtatgttaattcaaatgagttgagagaaacactaattagcttagaacaatataatttgaatgacgaaccatatgaaaatgaaattgatgattatgtcaatgttattaatgaaaaaggacaagaaacaattgagtcattgaatcataaattaagggaagctacaaggattggcgatgtagaattacaaaaatactatttacagcaaattgttgctaagaataaagaacgcatgtagcatgtgattttaaagaataatacgaataatgattatgtcaaaatgtataagggtaaatgatagttaccgcatttaaacaacactattgaaaaataaatattgggattagttccaatttgtaaaataaaattaaaaatatggatgaattaattaagaatttagtttaaaatagcaatattgaataaatttcgaatgttcatatttaaaatcgggaggccgtttcatgtctgataacacagttaaaattaaaaaacaaacaattgatccgacattaacattagaagatgttaagaagcaattaattgaaaaaggtaaaaaagagggtcatttaagtcatgaagaaattgctgaaaaacttcagaattttgatatcgactctgatcaaatggatgatttctttgatcaattaaatgataatgatatttcactagttaatgaaaaagatagttcagatactgacgagaaactgaatccaagtgatcttagtgcccctccaggtgttaaaataaatgacccagttcgtatgtaccttaaagaaattgggcgtgttaacttattaagtgcacaagaagaaatcgaattagccaaacgtattgaacaaggtgatgaagtagcaaaatcaagacttgcagaagcgaacttacgtttagttgtaagtattgctaaaagatacgtaggtcgtggtatgttattccttgatttaatccaagaaggtaatatgggtcttattaaagctgttgaaaaatttgactttaacaaaggatttaagttttcaacatatgcaacatggtggattagacaagcaatcactcgtgcaattgctgaccaagcacgtacgattcgtatccctgtgcatatggtagaaacaattaataaattaattcgtgttcaacgtcaattattacaggacttaggtcgagatccagcaccagaagaaattggtgaagaaatggatttaccagcagaaaaagttcgtgaaattttaaaaattgcgcaagaacctgtttcattagaaacaccaattggtgaagaagatgatagtcatttaggagactttattgaggatcaggaagcacaaagtccttcagatcatgctgcttatgaattattaaaagagcaattagaagatgtgcttgatacattaactgatagagaagaaaatgtattacgattaagatttggtcttgatgacggcagaacaagaacacttgaagaagttggtaaagttttcggtgttacacgtgaacgtattcgacaaattgaagcaaaagcacttagaaaattaagacatccaagtcgtagtaaacgtttgaaagactttatggattaa

SEQ ID NO: 85 - DNA, 4141 bp, Staphylococcus aureus
atgatttcgttaaataaccgattaacgacggtaagtcgatttttaaaacaaggtacaatcgcggatattggctcagatcatgcttatttgccaatctatgcaattcaaaaccatttatgcgaatgcggtattgctggagaagttattcaaggcccttttcaagctgctgtgaaaaatgtagctgcaaatcatttagtagaaagaattgatgtacgtttaggggatggcttaagtgttattcatcctgaggacgtaatcgataatatcacaatttgtggtatgggcggaccacttattgctaaaattttaaaagatgggcaagataagttaagtcaacatccaaggttgattttacaaagtaatatacaaactgaaaatttaagacaaacattacaacaattgaattatgaaataattgatgaaataataatggaagaaaaaggccatatttatgaaattgttgtagcagaacattctacacaattaatagagctatcatctgatgaattgaaattcggaccaaaattgctgaacaacaaaaatgaatattttataaaaaaatggcaaagagagttagaagcactttatcatattaaatcgaaactcaatactgaacaacatcatcaacgtttagctcaaattaatgacgaaattgctgtaattgaaagggtgttatagtaatgaaaatagctgatttaatgacattgttagatcatcatgtgccatttagtactgctgaatcttgggataatgtaggattgttaataggtgatggagatgttgaagttactggtgttttaacagcattagactgtacgttggaagtagtaaatgaagcaatcgaaaaaggttataatactattattagtcatcatcctctaatctttaaaggcgtaacatcattaaaagctaatggttatggtttgatcattagaaaactaattcaacatgacattaatttaatagcgatgcatacaaatttagatgtaaatccgtatggtgtcaatatgatgttggcgaaggcgatgggtttgaagaacatttcaataataaataatcaacaagatgtatactataaagttcaaacatatatacctaaggataatgttggaccatttaaagataagcttagtgaaaatggattagcgcaagaaggtaattatgaatattgtttctttgaaagtgaaggaagagggcaattcaaaccagttggtgaagctaatccaacaataggacaaattgataaaattgaagatgtagatgaagttaaaattgaatttatgatagatgcatatcaaaagtcaagggctgagcaattaattaaacaataccatccatatgaaacaccggtatttgattttattgagataaaacaaacatccctttatggacttggcgttatggcagaagtggataatcaaatgacattggaagatttcgcagctgatattaaatctaaattaaatatcccaagtgtccgttttgttggtgagtctaatcagaaaattaaacgtattgcaattattggtggttcaggtattggatatgaatatcaagctgtccaacaaggcgcagatgtctttgttacaggtgatattaaacatcatgatgccttagatgctaaaattcatggtgtgaatttaattgatattaatcattacagcgaatatgtgatgaaagaaggtttaaaaacgttactaatgaattggttcaatatagaaaaaataaatatagatgttgaagcatctacaattaatacagatccatttcaatatatttaaactaaaatctcgggatttctaaattttgaaatttcgaggttttaatatttttatttaaaatagcacatttatactttataatagtaaagatgaacatataaggaggccaaatcatggcaaaacatccattcgaacaatttaatctagaatctagtttaattgacgctgtgaaagaccttaattttgaaaaaccaactgaaattcagaatcgaattattccaagaatactaaagagaacaaatttaattggtcaatctcaaacgggtacagggaaatctcatgcatttttattaccattaatgcagttaattgatagtgaaataaaagaaccacaagcaatcgtagttgcaccaacaagagaacttgcacaacaactatacgatgcagcgaaccatttaagccaatttaaagctggtgtttcagttaaagtttttattggtggtacagatatagagaaagatagacaacgttgtaatgcacaaccacaattgattataggcacccctactagaattaatgacttagctaaaacgggacatttacatgtgcacttagcatcatatttagttattgatgaagcggatcttatgattgacttaggattaattgaagatgtagattacattgctgcaagattggaagataatgcaaatattgcggtgtttagtgctacaattccacaacagttacaaccatttttaaataaatatttaagtcatccagaatatgtagctgtcgacagtaaaaaacaaaataaaaagaacatcgaattctttttaatacctactaaaggtgcagctaaagttgaaaaaactttaaatttaattgatatactaaatccatacttatgtattattttctgtaatagtagagataatgcaaatgatttagcacgttcactaaatgaagctggtattaaagttggtatgattcatggtggtttaacgccacgtgaacgtaaacaacaaatgaaacgtatacgtaatttagaattccaatacgttattgccagcgatttagcatctcgtggtattgatattgaaggtgttagtcatgtcatcaattttgatgtgccaaatgatattgacttctttacgcatagagttggacgaactggtcgtgggaattataaaggtgtagcaattacgctttatagtcctgatgaagaacacaatatttcattaatagaagatcgcggttttgtattcaatactgttgatattaaagatggtgagttaaaagaagttaaagcgcacaatcagcgtcaagcaagaatgcgcaaagatgaccatttaactaatcaagtgaaggacaaagttcgaagtaaaattaaaaacaaagttaaaccaggttataagaagaaatttaaacaagaagttgaaaaaatgaaacgtcaagagcgtaaacaatttagtaagcagcaaaatagacaaaaacgtaagcaaaacaaaaaaggttaggtgtgttttatgttattaggatcacatgtttcaatgagtggtaaaaagatgttagaaggttctgctatagaagcgtatgaatatggtgaaacaacatttatgatttatactggtgcacctcaaaacacgcgccgtaaaagtattgaagatttaaatataactaaaggtcatgaagtgatggaaaaatatggcttatctaatattgttgttcatgcaccatacatcattaatattgcaaatacaaccaaaccagaaacgtttaatcttggtgtagatttcttgcaacaagaaattgaaagaacgcaagctataggcgctaaagatattgtattacatccaggtgcgcatgttggagctggtgttgatgccggaattaataagattattgaaggattaaatgaagttttaacgaatgacaataatgtacgtattgcgcttgaaacgatggcaggtaaaggtacagagattggtcgctcgtttgaagagttagcacgtattattgatggagttcataataacgaacgtttatcagtatgttttgatacatgtcatacgcatgatgctggatataatgtgaaagaggactttgatggcgtattaaatgaatttgataaaattattggagtcgacagaatcaaagttgttcatgtcaatgattctaaaaatgaccgtggcgctcaaaaagaccgacatgaaaatattggcttcggttacattggttttgatgcattaaattacattgtgcatcatgatagttttaaagatattccgaaaatcttagaaacaccttatgttggtgaagataagaaaaataaaaaaccgccatataaacttgaaattgaaatgttaaaacaacagcaatttgacccagaattaaaaaataaggttatgcaacaataa

SEQ ID NO: 86 - DNA, 3852 bp, Staphylococcus aureus
atgcctggaattatacaaatagacgatatgaaccaatctcaagctttaattggaaataatgatgaacatttaaaagcaattgaagagagtttcgatgttgtcatccatgcaagaggacaagaagttgccgttaaaggtacaaaaatagaaaacgtagaaaaagcggaatcagtattaatcaatttgctgaaggttattgatttaggtaataatattacaattaaagatgttgaagcagctattaaaatggcgcataataacacaattcaacatctgttagatttatatgatgaagagataactaaagatgcatttggtaagacgattcgtgcgaaaacgatggggcaacgtatatatgttaatgccatgaaaaataatgatttagtatttggtataggtcctgctggtacaggtaagacattcttagctgtagtttatgcagcaaagcaactccgtaaaggtgctgttaaacgtattgtattaacaagacctgctgttgaagcaggagagtcacttggatttttaccaggagatttgaaagaaaaggtagatccatatttaagacctttatatgatggtctatatactgttcttgggcgtgaacaaacagagcgatttattgaaagaggcattatcgaaatagcgccacttgcatatatgcgcggacgaacattagaagatgcatttgtaattcttgatgaggcgcagaatacgacacatgcgcaaatgaaaatgtttttaacaagactaggttttggctcaaaaatggtagttactggtgaccaaactcaaatcgatttacctaaaggtgttaaaagtggacttaaggaagcggtcagtaggttacacaacgttaaaggtataagtatattgaaattagatcagagcgatgtagtaagacatccattggtaagtaagatcattgaacattatgaaggagagaattaaatgtttacgatagattttagcgatcacacaggcttagttaaagatgcgtggtataaacaaattgaagatttattagaatttgctaaaaaagaagagcatatagaagacgatgctgagctttctgttacatttgtagataaacaagaaatacaagaaattaatcgaacatatagagataaagataaagttacagatgtaatctcatttgctttagaagaagatgagccagagattgattttagtggtcttgatataccacgtgttttaggggatataattatctgtacggatgtagcgcaagaacaagcaaacaattacggacattcttttgaacgagaattaggatttttagcattacatggatttttgcatctattaggttatgatcatatgactgaagcggatgaaaaggaaatgtttggtcgacaagatacaatattaaacgcttatggattaacacgagactaattatgaaaaggtttaaatatgcacttgatgggctgaaaatcttaattcaaaaagactataaatttcttttacatgtgtttgcaatgattgttgctattgtctttggtctcgtactaaatattaatcgtattgagtggatatttatactcattgctattgcattagttctcactgttgaagctttaaacactgctattgaatatgttgtcgatttagtgaccgttgaatatcatgatttagctaaatacgcaaaagatatagcggcttttagtgtacttatagtttcaatattagcatttattataggtttaatagtatttttaccacattttatagcgttattttagggaggcatatatgagttatcaacctcattattttcaagaagttagaaaagcacaacaagaatcatattcgccatacagtcaatttaaagtaggggcttatttaaaaacgaaagacggtagaactttttatggtaccaatgtagaaaatgcttcttatccattatcgatatgtgctgaacgagctagtttggtatcggcaatttctcaaggatacagaccaggtgattttgaatcaataactgtaaccgtagatgcagataaaccgtcatcaccttgtggtgcatgtcgtcaagttttaaaggaattatgtgatgatgatatgcctgtgtatatgacaaatcataaaggagatatggttatgatgacagtcgcagagttgctaccatttggattttcaggaaaggatttagaataaatgacagaacataaatcaggatttgtttcaattataggtagaccaaatgtagggaagtcaacatttgttaatagagtgattggccataaaatagcaatcatgtccgataaagctcaaacaactagaaataaaattcaaggtgttatgacaagagatgacgcgcaaattatattcattgatacgccaggtattcataaacctaaacacaaattaggtgactatatgatgaaagtcgctaaaaatacattatctgaaatagatgcaatcatgtttatggttaatgccaatgaggaaattggacgaggcgatgaatatattatagaaatgttgaaaaatgttaagacaccagtatttttagtattaaataaaatagatttagtgcatccagatgaattaatgccaaagattgaagaatatcaaagttatatggactttacagagattgtacctatttcagcattagaagggctaaatgtagatcattttattgatgttttaaagacgtatttacccgaaggacctaaatattatccagatgatcaaatttcagaccatcctgaacaatttgtagtgggtgaaatcattcgtgaaaaaatccttcatcttacaagtgaagaaatccctcatgcgattggtgttaatgtggaccgtatggttaaagaaagcgaagatcgtgttcatatcgaagcaactatatatgttgaaagagattcgcaaaaaggaattgtcattggaaaaggcggtaaaaagttaaaagaagtaggaaaacgtgcgagacgtgatatagaaatgcttctaggctctaaagtatacttagaattatgggtcaaagttcaaagagactggcgaaacaaagttaactttattcgccaaattggttatgttgaagaccaagattaatcttaaaagtggtgaagataattgttaatgcgccaaaaagggattatcatcaaagcagttgattatggtgaatctgataaaattatcacgattttaaatgagcatggtgcaaaagtaccacttatggcaaggcgtgctaaaaaagttaagacgggtttacaagcgcaaacgcaattgtttgtttatggtttgtttatttacaatcagtggcgaggtatgggaacgttaaattctgtagatgttattagtcaacattataaattacaaatggacctttacgtaagcagttatgcctctctggcagctgaaactattgagcgctcaatggatgaaggtgacattgcaccatataactatcaattattacaatttgttcttgaaaaaatagaatcaggtacatctgcacagttaatgtcagtcgtagttatgttaaagtgcatgaaacgatttggttttactgcatcatttaatcgctgtgctgtgagtggtaatgacacacaagcagatttaataggttatagttttaagtttgacggtgcgatttcaaggcaagaggcttctaaagatgtacatgcagttatattatcgaataaaacactatatttattagatgtattacaaaaattaccgatagataaaatgaattcattgaatatccatcaagaaattattgatgaaatgtcagatatcattttaatgttatatcgtgaatatgcaggtatgttttttaaaagtcagaaactaatcaaccaattaaaaagattggaacaataa

SEQ ID NO: 87 - DNA, 9085 bp, Staphylococcus aureus
atgacggtacaaagtgcatatatacatattccattttgtgtaagaatatgtacatattgtgatttcaataaatattttatacagaatcaacctgtagatgagtacttagatgcactaataacagaaatgtctacagcaaaatataggaacttaaagaccatgtatgtaggtggcggcacaccaacggccctttctattaatcagttggaaagattacttaaagcaatacgtgatacgtttacaatcacaggcgagtatacatttgaagcaaatcctgatgagttaactaaagagaaagtccaactattagagaaatatggagtaaatagaatttcaatgggcgttcaaacattcaaaccggagttattgtctgttttaggtagaacgcacaatactgaagatatttacacttcggtgttaaatgctaaaaacgcaggtattaaatcaatcagtttagatttaatgtatcatttaccgaaacagacgattgaagattttgaacaaagtttagatctagctttagatatggatattcaacatatttcgagttacggcttaatacttgaacctaaaacccaattttataatatgtatagaaaagggttgcttaaacttcctaatgaggatttaggtgctgacatgtatcagttgttgatgtctaagatagaacaatctcctttccatcaatacgaaatatctaattttgcattagatggccatgaatcagaacataataaggtttactggtttaatgaggaatattatggatttggagcaggtgcaagtggttatgtagatggtgtgcgttatacgaatatcaatccagtgaatcattatatcaaagctataaataaagaaagtaaagcaattttagtatcaaataaaccttctttgactgagagaatggaagaagaaatgtttcttgggttgcgtttaaatgaaggtgtgagtagtagtaggttcaaaaagaagtttgaccaatctattgaaagtgtctttggtcaaacaataaataatttaaaagagaaagaattaattgtagaaaagaacgatgcgattgcactaacaaagcgagggaaagtcataggtaatgaggtttttgaagctttcctaataaatgattaaaaaaattgaaatttcgagtctttaacattgacttactttgaccaatttgataaattataattagcacttgagataagtgagtgctaatgaggtgaaaacatgattacagataggcaattgagtatattaaacgcaattgttgaggattatgttgattttggacaacccgttggttctaaaacactaattgagcgacataacttgaatgttagtcctgctacaattagaaatgagatgaaacagcttgaagatttaaactatatcgaaaagacacatagttcttcagggcgttcgccatcacaattaggttttaggtattatgtcaatcgtttacttgaacaaacatctcatcaaaaaacaaataaattaagacgattaaatcaattgttagttgagaatcaatatgatgtatcatcagcattgacatattttgcagatgaattatcaaatatatctcaatatacaactttagttgttcatcctaatcataaacaagatattatcaataatgtacatttgattcgtgctaatcctaatttagttataatggttatcgtattttcatcaggtcatgttgagcatgtacatcttgcttcagacataccgtttagtaatgataaactaaatacaatatcaaattttgttactaacaaactaactgagtttaatcagaatttacaagatgatattgtctcttttgttcaatcagagcaggaagaaatatttatcaataaattgataaatacgatgaataatcatatttctaatcaaagtaatagcatttatatgggtggaaaggttaaacttattgatgcattgaatgaaagtaatgtatcttcaattcagcccattctacaatatatagaatcaaatagaattgcagaattattacaagatatatcttcaccaaatattaatgtaaaaattggtaatgaaattgatgacagcttaagtgatatttcaattgtaacaagtcaatatcattttgatgaaacgttaaaaggtcaaatcgctgtgattggacctacagctatgcattatcaaaatgtcattcaattattaaatagaatttggtaatgatggattagaaagtattggaggacagaaaatgacaaataaagacgaatcagttgaaaaaaacactgaatcaacagttgaagaaacaaacatcaaacaaaatattgatgattcagttgaacaagctgaagaaagtaaaggtcatttacaagatgaagcaatagaagaaacgtctgacgagaatgttattgaagaaatagatccaaaagatcaaaaaattaatgaacttcaacaattagcagatgaaaacgaagagaaatatttaaggctctacgctgagtttgaaaattataagcgtagaattcaaaaagaaaatgaaataaataaaacatatcaagcacaacgtgtgttaacagatattttaccagcaatagacaatatagaacgtgcacttcaaattgaaggtgatgatgagacttttaaatctcttcaaaaaggtgtacaaatggtgcatgaaagtttgattaacgcactaaaagataatggtcttgaagttattaaaactgaaggtgaagcatttgatccaaatattcaccaagctgtagttcaagatgataaccctgattttgaatctggcgaaatcactcaagaactacaaaaaggatacaagcttaaagatagagtattaagaccatcaatggtcaaagtaaaccaataacttaaatttggcgaaaagacattgtttaaaattaaattaatttaatgattaaatggaggaattttattatgagtaaaattattggcatagacttaggtacaacaaattcatgtgtaacagtattagaaggcgatgagccaaaagtaattcaaaaccctgaaggttcacgtacaacaccatctgttgtagctttcaaaaatggagaaactcaagttggtgaagtagctaaacgtcaagctattacaaacccaaacactgttcaatctattaaacgtcatatgggtactgattataaagtagatattgaaggtaaatcatacacaccacaagaaatctcagctatgattttacaaaatttaaaaaatacagctgaaagctatttaggtgagaaagttgacaaagctgtaattacagtacctgcatactttaacgacgctgaacgtcaagcaactaaagatgctggtaaaattgctggtttagaagttgagcgtatcattaatgaaccaacagctgcagcattagcatatggtttagataaaactgataaagatgaaaaagttcttgtttttgacttaggtggcggtacatttgacgtatctatcctagaattaggtgacggtgtattcgaagtactatcaacagccggtgacaacaaacttggcggtgatgattttgaccaagtaattattgactacctagttgcagaattcaaaaaagaaaatggcgtagacttatctcaagataaaatggcattacaacgtttgaaagatgctgctgaaaaagctaaaaaagacttatcaggtgtatcacaaactcaaatctcattaccatttatctcagctggtgaaaacggtccattacacttagaagtaaacttaactcgttctaaatttgaagaattatcagattcattaattagaagaacaatggaacctacacgccaagcaatgaaagacgctggcttaacaaactcagatatcgatgaagttatcttagttggtggatcaactcgtattccagcagtacaagaagctgtcaaaaaagaaatcggtaaagaacctaacaaaggtgtaaacccggacgaagtagtggcaatgggagctgcaatccaaggtggcgttatcacaggtgacgttaaagacgtagtattattagacgtaacaccactatctttaggtattgaaattttaggtggacgtatgaatacgttaattgaacgtaacactacgattcctacatctaaatctcaaatctattcaacagcagtagataatcaaccatcagtagatgtacacgtattacaaggtgaacgtccaatggctgcggataataaaacacttggtagattccaattgactgatattccaccagctgaacgtggtaaacctcaaattgaagtaacgtttgatatcgataaaaacggtattgtaaatgtaactgcaaaagacttaggtacaaataaagaacaaagaattacaattcaatcaagttcttcattatcagacgaagaaatcgaccgtatggtaaaagatgctgaagttaacgctgaagcagataaaaaacgtcgtgaagaagtagacttaagaaacgaagctgacagtctagtattccaagttgaaaaaactttaactgatttaggcgaaaatattggtgaagaagataaaaaatctgctgaagagaaaaaagacgctcttaaaactgctttagaaggtcaagatatagaagatattaaatctaaaaaagaagaacttgaaaaagtgattcaagaattatcagcaaaagtatatgagcaagcggctcaacagcaacaacaagcacaaggtgcaaatgctggtcaaaacaacgatagtactgtagaagatgctgaatttaaagaagtaaaagacgacgacaaaaaataattaaacaatacaattagaatgttgtcatgatctgaaaagtcaaagtcaatagaacattggctttggctttttatttggatagtatgacatattacgttaaactatatgagttaattaagaaaaggagagatagctgtggccaaaagagactattatgaagttttaggcattagtaaagatgcttcaaaagatgaaatcaaaaaagcgtatcgaaagctttcgaaaaaatatcatccagatattaacaaagaagaaggtgcagatgaaaagtttaaagaaatttctgaagcctatgaagttttaagtgatgataataaacgcgcaagctatgatcaatttggacatgatggtccacaaggttttggtggacaaggattcaatggctctgactttggcggttttagtggcttcggtggcggcggttttgaagatatctttagctctttcttcggtggcggcagacaaagagatccaaatgcaccgcaaaaaggtgatgatcttcagtatacaatgacattaacatttgaagaagcggtatttggtacaacaaaagaaatttcaatccgtaaagatgtaacatgcgaaacatgtcatggtgatggtgcaaagcctggaacaagtaaaaagacttgtagttactgtaatggcgctggtcatgtagctgtagaacaaaacacaattttaggtagagttcgtactgaacaagtttgtcctaaatgtaatggaagtggtcaagaatttgaagaagcttgtccaacatgtcacggaaaaggtactgaaaataaaacagttaaattagaagtgaaagtacctgaaggtgtcgacaatgaacaacaaattagattagctggtgaaggctctccaggcgtgaatggaggacctgctggtgatttatacgtagtatttagagttaaaccatctgaaacatttaaacgtgatggtgatgatatttattacaaattaaatgttagcttcccacaagcagctttaggcgatgaaataaaaataccaacattaaataatgaagttatgttaacaatccctgctggtacacaaacaggtaagcaattccgcttaaaagaaaagggtataaaaaatgttcatggctatggatacggagatttatatgttgatattaaagtagtaacgcctactaaattaacagatagacaaaaagaactaatgaaagaatttgcccaattaaatggtgaagaaattaatgaacaaccttcgaattttaaagatagagcaaaaagattctttaagggagaataaagtatgaactggacagagctttcaattattattaatcatgaagcagtagaattggctaccaatatacttgaaaatcatggatcaaatggtgtcgtgatagaagattcagatgatttaattaaccaaccagaagataaatacggtgaaatttacgctttgaaaaaagaggattatccagataagggagtaagattgaaagcctattttaatgaaatgacttatgatgataagttgcgacagcaaattaaagatgagttattaaatttagatgaacttgatcaacataacattcaattcagtgagcaaattattgcagagacggattgggaaaatgaatggaaaaactatttccatccattccgagcgtcgaagaagttcacaatagttcctagttgggaaacatatgctaaagaagcggatgaagagctttgcattgagctcgacccaggtatggcttttggaacaggcgatcatccgactacaagtatgtgtttgaaggcaatagaaacatatgtattgccacagcattcagtaattgatgttggtactggctcaggtatattaagtattgcaagtcatctaatcggtgtaaaacgtattaaagcgttggatattgatgaaatggcagtgagtgtagctaaagaaaacttcagaagaaatcattgtgaaacgttaattgaagctgttccaggtaacttattgaaagacgaaacagaaaaatttgatattgtaatagcaaatattttagcgcatattattgatgaaatgattgaagatgcttataatactctaaatgaaggcggttattttattacttctggtattataaaagagaagtatgaaggtatacagtcacatatggagcgtgtaggttttaaaattatttcagaacaacatgacaatggttgggtttgtcttgttggccagaaagtgagtgaataatgtgcaacgttatttcatagaccaaaacgctgatgtaagtcagcgtttttttattacaaaaaaagaagatattcatcatataacaaatgtaatgagatatgatgttggtagtaaaattattttaacttttaatgatcaaacagtttatttatgtgaaattgctgacataacaagtgataaaattgcagttgatttaaaagaaaaacaaaatattaatacagaattgccagttgatgttacgatttgcagtggactaattaaagctgacaaatatgagtggttgctacaaaaagctactgaattgggtgcttcatcatttatagctgtgagcatggaacgctcaattgttaaattaaacgaggcgaaagttgtcaaaaagatagagcgttggcaaaaaataattaaagaagctgctgaacaaagctatcgtttagtgattccatctattcaattcgagtcgaatttaaaattaatttgtgatactattgataattatgactatattcttattgcatatgaagaggaagcaaaagatggtgagttaagcaatttcaagcaaactttacaacaattcaaggctcaggataaagtgttgatgatttttggtcctgagggtggtttgtcagaaaatgaaatttcattatttagtaatactagtacagttgttggtcttggaccgagaattttacgggcagaaactgcgccattgtatgcgttaagtgcaataagttatgaaaaagaattaatggggtgaatatttatgtcaacagttgcgtttcacacattaggttgtaaagtaaaccattatgaaactgaagcaatctggcaattatttaaagaagcaaactatgagcgcgttgactttgaagcgaatgctgatgtatttgttattaatacttgtacagtaacgaatacaggtgataaaaaaagtcgtcaaataattagacgtgcaataagacaaaatcctgatgctgtaatctgtgtaacaggttgttatgcgcaaacttcatcagctgaaattatggaaattcctggtgtcgatgtagtagttggtacacaagatagacataaactattaggttacattgatgaattccgtaaagaacgccaaccaattaatggtgttggaaatatcatgaaaaatcgtaaatatgaagaattagatgttccatattttacagatagaacacgtgcgtcattaaaaattcaagaaggttgtaacaacttctgcacattctgtattattccatgggctcgtggcttaatgcgttcaagagatccggaaaaagtagttgaacaagcgacgcaactagtgaattcaggatataaggaaattgtattgacgggaattcatacaggtggatatggtcaagatttaaaagattataacttggcccaattattacgtgatcttgaaacgattaatggattagaacgaattcgaatttcttcaattgaagcaagtcaacttacagatgaagtaattgacgttttagaacgttcaacaaaagttgtgcgtcatttgcatattccattacaatctggttcagatacagtattaaaacgtatgagacgtaagtatacaatggatagattttcagaacgattaacaaaattgcataaagctttaccagacttggcagttacgagtgatgtaattgttggtttcccaggtgaaactgaagcagagttccaagaaacatatgattttatcgtaaagcataagttctctgaactgcatgttttcccttattctcctagaattggcacgccagctgcaagaatggatgaccaaattgatgaagaaattaaaaatgaacgcgtgcataagttaattacgctaagcaatcaactcggaaagttatatgtgtctaaatttgatcaagatgtgcttgaagtaattcctgaggaacagggtgacacagaaggtacattagttggatatgcagataattatatgaaagtacaatttgaaggtgacgaatcactcataggtcaaattgtaaaagttaaaattacgcaagcaaattatccattaaatgaagggcaagcaattaaagttgttgatttcgcaacaaataaatctgatagagaagttttagtttaa

SEQ ID NO: 88 - DNA, 10184 bp, Staphylococcus aureus
atgattggtataattggtgccatggaagaagaagtaacaatattaaaaaataaattaacacaattaagcgaaatttcagttgcacatgttaaattttatactggcattttaaaagatagagaagtagtgattacccaaagtggcattggaaaagttaatgctgcaatttctacgacattattaattaataagtttaaaccggacgtcattattaatacaggttctgctggagctttagatgaaagtttaaatgtaggtgacgttcttataagtgatgatgtaaaatatcatgatgcggatgcaacagcatttggttatgaatatggacaaataccacagatgccggtagcatttcaatcaagtaaacctttaatagaaaaagtatctcaagttgtacaacaacaacaattaacagctaaagtaggcttaattgtaagtggtgatagctttatcggtagtgttgaacaacgccaaaaaattaaaaaagcatttccaaatgcgatggcggttgaaatggaagcaactgcaattgcacaaacatgttatcaatttaatgtaccatttgttgtagttcgtgcagtttcagacttagcaaatggagaagcggaaatgagcttcgaagcatttttagaaaaagcagctgtatcatcaagtcaaactgttgaagcattagtgtctcaattataaaaaggtaaaggtgagttaaatgggtttagttcgcaagttttttatgccgaattcatatgttcaatcaatatttcaaattgatttagacaagttagtggacaaaggcgttaaaggtattattacagatttagataatacgctagtaggttgggatgttaaagaacctacagaacgtgttaaagcatggtttaaggaagctaatgaaaaaggaatcactattacaatcgtgtctaataataatgagtctcgtgttgctagttttagtcagcatttagacatcgattttatttttaaagcgagaaagccaatggggaaagcgtttgataaagcaataactaagatgaatatcagaccagatcaaactgttgttataggtgaccaaatgcttactgatgtatttggtggtaatcgtcgaggtctatatacaattatggttgttccagttaaacgaactgatggctttattactaaggttaatagattaattgaaagacgattattacgtcatttcagtaaaaaaggttatatcacatgggaggaaaattgattgtctgacattttaaaatgtatcggttgtggtgcgccacttcaatctgaagataaaaataaacctggttttgtaccagagcataatatgtttcgtgatgacgtgatttgcagacgttgtttccgcttgaaaaattataacgaagttcaagatgtaggattagaaagtgaagactttttaaaattattatcaggacttgcggataaaaagggtattgtcgtcaatgtcgtggatgtatttgactttgaaggatcatttattaatgcagttaaacgtattgtcggaaacaaaaaaatcattttagcagcaaataaattggatttattgccgaaacaaattaataaacgtcgagttaaagaatggttaaaacgaacagcaagaaaatatggtttggaagctgacgatgtcgtattaatttcagctgaaaaaggctggggcatagacgacttattatcatcaattgcgaatattcgagaaaatgaagatgtgtatattgtagggacaacgaatgttgggaaatctacattgattaataaactgattgaagctagtgttggtgaaaaagatgtagtaacaacttcaagattccctggaacaactttagatatgatagatattcctttagatgaatcatcatttatgtatgatacaccaggtattattcaagatcatcaaatgacgcatttagttagtgaaaaagaattgaaaattattatgcctaagaaagaaataaaacaacgcgtatatcaattaaatgaggcgcagacattattcttcggcggtctagcgcgcatagattatgtatcaggtggtaaacgtccgttagtttgtttcttttctaatgacttgaatatacatcgtactaaaacggagaaggctaatgatttatggcgtaatcaacttggcgatttattaacgccacctggaaatccacaaaattttgatcttaatgagttaaaggctgttagacttgaaacaggcaaagagaaacgtgatgttatgatctctggtctaggctttataactataggaccaggagctaaagtaatcgttcgtgttcctaaaaatgttgatgttgtattaagaaattctattttataaggtgatttaaaaaatgaaatttgcagttatcggaaatcctatttcacattccttgtcgcccgttatgcatagagcaaattttaattctttaggattagatgatacttatgaagctttaaatattccaattgaagattttcatttaattaaagaaattatttcgaaaaaagaattagatggctttaatatcacaattcctcataaagaacgtatcataccgtatttagattatgttgatgaacaagcgattaatgcaggtgcagttaacactgttttgataaaagatggcaagtggatagggtataatacagatggtattggttatgttaaaggattgcacagcgtttatccagatttagaaaatgcatacattttaattttgggcgcaggtggtgcaagtaaaggtattgcttatgaattagcaaaatttgtaaagcccaaattaactgttgcgaatagaacgatggctcgttttgaatcttggaatttaaatataaaccaaatttcattggcagatgctgaaaagtatttagctgaattcgatatcgttattaatacaacaccagcgggtatggctggaaataacgaaagtattattaatttaaaacatctttctcccaatactttaatgagtgatattgtttatataccgtataaaacacctattttagaggaagcagagcgcaagggaaaccatatttataatggcttagatatgtttgtttaccaaggtgcggaaagctttaaaatttggactaataaagatgctgatattaattctatgaaaacagcagttttacaacaattaaaaggagaataacatatgcttactggcaaacaaaaaagatacttaagaagtttagcacacaatattgatccgatttttcaaattggaaaaggcggtatcaacgaaaatatgattaaacaaatagatgatacgttagaaaacagagaattgattaaagtacatgtactacaaaataactttgatgataaaaaagaattagctgaaacattaagcgaagctacgcgtagtgaattagtgcaagtgattggatctatgatagtgatttatagagaatctaaagaaaataaagaaattgaattgccataataatgaaaaagatagtactttacggcggtcagtttaaccctatccatactgcacatatgatagtagctagcgaagtatttcatgaattacagccagatgaattttattttttacctagttttatgtctccattgaaaaagcacaataattttatagatgttcagcacagattaacaatgatacagatgattatcgacgagcttggttttggagatatttgcgacgatgaaattaaacgtggtggtcagagttatacctatgacacgatcaaggcattcaaggagcaacacaaagacagtgagttgtactttgttattgggacggatcagtataaccaactagagaaatggtatcaaattgaatacttaaaagaaatggttacttttgtagttgtaaatcgagacaaaaatagtcaaaatgttgaaaatgctatgattgcaattcagatacctagggtagatataagttcgacaatgattcgacaaagagttagtgaagggaaatctatccaagttcttgttcctaaatccgttgaaaactatattaagggggaaggattatatgaacattgaaaaagcaaaacggcttgcaaaagagaaactgccagagaaacgttataatcattctttaagagttgcagaaacagcgattaaattggcagaaatttatgatggagacactagtaaagtagaattagcaggtgtattacatgatttctgtaaatatgatgatttaggtaaaatgtatcaaattgttcgacaatacgaattaggtaatgatctactgagttatggtagtgaaatattgcatggccctgtgtgtgcagcaatcatggaacatgaatatggtatcaatgatgaggaagtattaatggctatcaaataccatactactggacgtcaacaaatgacaaaaactgaaaaactgatttttattgctgattacatcgaacctggaagaacaatcccaggagttgatgatattcgagatatggcatacaatcaaggtagtttagataagacaatttatgaaatttctaaacgcacagtactatttttaatacagaaagatattacggtatataataagacgattgactgtttaaattattataactatagtgacgaaagaataaaggatgattaaatgaattcacaagaattattagcaattgctgtggatgcaattgacaataaaaaaggcgaagatacgatttctttagaaatgaaaggtatcagcgatatgacagattattttgttgtaacgcacggaaataatgaacgacaagttcaagcgattgctagagcggtgaaagaagtagccaatgaacaaaatatagaagtaaaacgtatggaaggatacaatgaagcgcgttggatattaattgacttagctgatgttgtggtacatgttttccataaagacgaaagaaattattataatattgaaaagttatatcaagatgcaccattagaatcatatggtcaggttgcgtattaattatgtcgcaatatgcagaaatgagcctagtgtacgatcaattgactcaagatcaaccatatgaaaaatggtttgaaattgtaaaaaatcactgcaaagatgaatcaaatattttagatattggatgcggtactggtagtttaacagttcaattagaagctttaggtaatgttactggtatggatttaagtgttgatatgttgactgttgcagctcaaaaatcagcaaatgtaaattggcttgaaggagatatgacatcttttgatttgcaacaacaatttgatatcatcactattttttgtgactctctaaattatttgcaagatgaaactgcagtgattgaaacattcatcaatgtttatcatcatctgactgattcaggtgtatttatttttgatgtacatactgtttataaaatgatgactttgtttaataatcaaagttatattgatgataaaggggacatttttttagcatgggatgctgtgcaaggagatttacctttaagtgtttatcatgatatgacatttttcattcgacatgaagatgaaacatattcaagatttgatgagtctcattttcagagaacatttgatgaaaagacatatttgtcttggttagctcaagtcggttttaaacatgttgaaacatttactgattttaatatagatgaacataatgaagatacagaaagattgtttttcattgcgaaaaaataaaagtaaaaccactcgctcagacgtgtataaagttgaggagtggttttattgtatcaatttttattacgctataaagattttttaactcagtggaagttatatattataagtgctgttgttttaattatggtattaattggttttatattctggagacaagatgattatacttcaagaaattttgaaaataaagatactgctctgaaacaaagcactagtgaaaataatagtttgtccaaattagaagatgtccaggtcaaagatggagataattccaaaaataaaggtcctgtatatgtcgatgtaaaaggtgctgttaaacatcctaatgtttataaaatgacatctaaggatagagtagttgatttacttgataaagcacaattattggatgatgcagatgtaagtcgaattaatttgtctgaaaaattaacagatcaaaaaatgattttcatacctcataaaggacaaaagaatgttgaaccacaaattgaagtaaacagtgtgcacgtaaaaaatgggaacacaaataatactaaagtaaatttaaataccgcatctgtatcagaattgatgtctgttcctggagtagggcaagctaaagctaatgcaattgttgaatatcgcaaccaacaaggtgcatttcaagaaattgacgatttgaaaaaagtaaaaggttttggaagtaaaacttttgataaactgaaatcttatttcacgatataatggattattttaattgcaaattttattttttgtgattaatcttatattattagaaaatgttactaaattttaagtatggaaggtgaacatcttggaaagaatcaaatgggaagaatattttatggcacaaagtcatttgctagcattacgttcaacttgtcaaagattatctgtaggtgcaacgattgttaaggataatcgtattattgctggtggttataatggctctgtagctggcgaggtgcattgtatagatgaaggatgtttaattgaagatggacattgtatcagaacgatacatgcagaaatgaatgctttattacaatgtgcaaaacaaggtgtatctactgaaggtgcaacaatctatgttactcattttccatgcctaaattgtacaaagtcaattattcaagcaggtataaagcgtatctactatgcagaagattatcataaccatgaatatgcaactaaattactcaaacaatctggtattgaatttaaaaaaattccattttcaccagaatatgttgctaaatatctgactaaaggttaatgttttgctgtatgtcgcgttatcaatgattgtaggagtgctttggaattctagcaaagtgctctctacatttcttttcattttacttttgtatattacttatcgtaaaaataaaatcgtttatgcccctatttctctctttttaatcattttctcctcatggtatttacattattcacaacaagcaatatttaattatatcaattatattgaacgtaattctcagtttaatgagcgtgctcaagtaatccaaattcaacgtcaaggtagtgacacatataaaggtaggttgagtttaaaaaatgaaatatatcctttctttttaacagataaaaagaattttgatttaaagaaaattgaaagtcgtaattgtattgttaaaggacaattcaaagttaatgaaaataagtttgtaactcttaaattacaaagtatagttgtacaaagctgcctagaatcgaaccggtctaatttaattgagaaacataaacagtttataatgaatcgaatttatgattcgggtattaagtttccggatcgtattatggcattgattactggtgacgtaaaagaaattaatgagcaatttaaggaacgtgttaaagagataggtatatatcatttgctggcagttagtggctcgcatatagctgcaattgtattcttaatttaccaacctttaaaacgattaaatttacctttatttgtcattaaaggaattacaatcattgtattaactttatatgctcaatacacaaattatgcacctagtgctgtaagagctataataatgacaactcttgtactgcttattactaagcaaattaaaataaagggtattcagctattagcatttgcatttataattatgtttattttaaacccactagttgtttatgatattggatttcaattttcattcatcatttcattttttattatgctactttttccttttttacagcaattgtcaaagttacaatcattattcataattacgtttattgcacaattagcttcatttatcgttgccattccaaactttcatcaacttcaatgggtgggatttttatctaatttgatttttgtaccgtactattcgattatattgtttccgctatctattttattctttattacaagtcattttattgtgggattaacgccgctaaattacttggttgacctaagttttaattttcatgactggttactagacctattcacaagaattaagcaatcacatttttctgttcccaagtttaatgattggatatttataatatttataatttctgtttattacatattttggttattggctaaacgtaaatatatattggttacgttttggactataattattctgacattattaataacgtttccaacaaattcacatcacaaaattacaatgttaaatgtggggcagggagacagtattttatatgaaggcggtaagaaccaaaatgtcttgattgatacaggtgggaaagtgattgatgatactaaacaacctagttattcaatttctaaatatcatattttaccaacgctaaatgaaagagggataaatgaattagagtatctaattttaacacatccacacaatgaccatattggtgaagtggaatatattattagtcatattaaaattaaacatatagtgatatacaataagggatatagtagtaatacattgatgttattatcgaaattaagccataagtacaacattaaacttatggatgtaagacaagttagtagttttaaacttggagatagtagttttctattttttgatagttttattccaaatagccgagataaaaatgagtattcgattattactatgattacatatcaaaataaaaaagttttattaatgggcgatgctagtaaaaataatgaatctttactactaaaaaaatataacttgccggagattgatattttaaaagtaggacatcatgggagcaagacaagtagttctaaagaatttatagagatgattaagcctaaaataagtttgatttcttctgggaagaacaatatgtatcatcttcctaatatagaagttgttaaacgattgcaaaggattcgcagtcgcatttacaatagtcaacaaaacggtcaagttacaattgacttagatgataatttaaaagttgattcaaactcttatggaaatgcaagtggtttatagatacagaaacatgatataatctattgatgtgtcaaacgaatgaaagggtgtaatgaatgagcgacaatattgtagctatttatggagatgtgcctgaattggttgaaaaacaaagtgcagaaatcatatcacaatttttgaaaagtgatagagatgactttaactttgtgaaatataatttatacgaaacagagattgcaccaattgttgaagaaacattaacattgcctttcttttcagataaaaaagcaattttggttaaaaatgcatatatatttacaggtgaaaaagcgccaaaagatatggctcataatgtagatcaattaatagaatttattgaaaaatatgatggcgaaaatttgattgtctttgagatatatcaaaataaacttgatgaaagaaaaaagttaactaaaactctaaaaaagcatgcaaggcttaaaaaaatagagcaaatgtctgaagaagaaataaaaaaatggattcaaagtaaattaaatgagaatttcaaagatatcaaaagagatgcattagatttatttattgagttgacaggtattaactttaatattgtctcacaagagatagaaaagttgattttatttttaggcgatagaccaacaattaataagcaggatgttaaccaaattattaatagaagtttagagcaaaatgtatttttactgactgaatacattcagaaaagaaagaaagaacaagcaattcatttagtaaaagatttaataactatgaaagaagaaccaattaaattacttgcactaattacaagtaattaccgattattttatcaatgtaagattctgagtcaaaaaggatatagtggacagcaaattgctaaaacaataggagtgcatccatacagagtaaaattagcgttaggacaagtaagacattatcaacttgatgaattattgaatattgtagatgcttgtgcggaaactgattataaacttaaatcatcatatatggataaacagttaatactggaattattcattctatctttataa

SEQ ID NO: 89 - DNA, 3972 bp, Staphylococcus aureus
atggatgacctaaataaaaaatatttaatagatttacatcaacatcaaaatagttcaatcgaagttttgcgtgaatttgccgagggaaatgaagtgccaattgtagatcgtttaacattagatttaattaagcaattaattcgtatgaataatgttaaaaatattttagaaattggtacagcaatcggctatagttctatgcaattcgcttctatatctgatgacattcatgtcacaacgatagagcgtaatgaaacgatgattcaatatgctaaacaaaatttagctacttatcattttgaaaaccaggttcgaattattgaaggtaatgctttagagcaatttgaaaatgtaaatgacaaagtttatgatatgatatttattgatgcagcaaaagcgcaatcaaagaaattttttgaaatatatacaccacttttaaagcaccaaggtctcgtaattacagataatgttttatatcacggttttgtatcggatattgggattgttagatcgagaaatgtaagacaaatggttaaaaaggttcaagattataatgagtggttaataaagcaaccaggatatacaacgaattttttaaatatagacgatggattagcgatttcaattaaaggagaatgactatgacagaattacttgtcacacccaagtcattaagccatatggaaacacttattgatttaggtgcagatgcttttgtaattggcgagcaaaagtttggtttaagacttccaggggaattcaatagacaacaaatgacagaggctgtcgcattagctcacaaaaacgataaaaaagtatatgcggcagtgaatggattatttcataattatcatttagatgctgtagaagattatattaattttttacatgaaatacgagttgacagaattattttcggggatccagcagtagtaatgtatgtgaaggcgcaagaaaatccaataccacttcattggaatgcagagacgttagtaactaatcattttcaatgtaattactggggtaaaagaggcgcatcaagagctgtcttagcacgtgagctgaatttggatgaaattattaatataaaagaaaattcaaatgtggaaattgaggtgcaagttcaaggaatgacttgtatgttccaatcaaagcgtatgctactaggcaattattatacgttccaagatcgccaaatgaaaattgaacgtcgcaatgatgaacaatctttattactttatgatgaagaaagacaaaataattacccagtttacgaagattacaatggtacgcacattatgtcaccaaacgacatttgtttaattgaagaattagcaccattttttgaggcgggtatagattcatttaaaatcgatggtattctacaaacggaagaatatattaatgtggtaacggaacagtatcgtcaagcgatagatttgtacaatgaagatcctgaaatctatgaagatgagaaatttatgttgattgatccaattgaagaaattcaacctgatcatcgaccatttgacgaaggtttcttatataaacaaacagtatattaaggaggttaatcatgaagacaatagaagagattaaatcaactcctaaaacagttatgaagaaaccagaattattagcacctgctggaaacttagaaaagttaaaaatagcagtacattatggcgctgatgccgtatttttaggtggtcaagaatatggattacgttcaaatgctgataatttcacgatggaagaaatagctgaaggtgttgaatttgcgaaccgttacggtgccaaaatttatgttacgacaaatattattgcacatgatgagaatattgaaggtctagaatcatatttgcgtaatttggaaaagactggtgcgacaggtatcattgttgcagatcctttaattatcgaaacatgtaaagaagttgcgccaaaacttgaaattcatttatctactcaacaatcactttctaattacaaagctgtagaatattggaaagaagaaggattggatcgtgttgtattagcacgtgagaccggcgcgatggaaatgcgtgaaatgaaggaaaaagtagatattgaaatcgaagcatttattcatggtgctatgtgtatcgcctattcaggtagatgtacattaagtaatcatatgactgcaagggattccaacagaggcggttgctgtcaaagttgccgttgggattatgaattattagaagttgatgataatggtgaacttgatgtattttataatcaaggtgaagttacaccgtttgcgatgagtcctaaagatttaaaattaatcgaatcaattcctcaaatgatggatattggtgtggactcattaaaaattgaaggacgtatgaagtcaattcattatattgcaacagttgtctcagtatatcgtaaagtcattgatgcgtatgcggcagatcctgacaactttaagattaatccggaatggttaattgagttagataaatgtgcaaatagagacactgcaccagcattctttgagggaacacctggttatgaagaacagatgtttggtcaacaacaatctaaaaaatcaccatttgatttttgtggtttggtattagactataatgaagatacaaaaattgcgactattcaacaacgaaataactttaaaccaggtcaagaaatagaattctttggtccagaaattgaaacatttacacaagtagtagaagcaatttatgatgaagaaggtaacagcttagacgcggcgcgccatccattacaaatcgttcaaattaaagtggatcgcccgatatatccaaacaacatgatgagaaaggaaattggctaatgaaagctactacaatcattggcatagctggtggatctggctcaggaaaaacaactgtaactaacgaaattatgaaaaacttagaaggtcatagtgtcgctttacttgctcaagattactattataaagatcaaaagcacttgactttcgacgagcgcctagaaaccaattatgaccatccatttgcattcgataatgatttattaattgaaaatcttaaagacttgaaaaatggtaaagcagtagaagtaccgacatatgattatgctagtcatacaagaagtgacattaccattgattttaaacctaaagatgttattatcgtagaaggtattttcgctttagaaaataaggtattacgtgatatgatggatgttaaaatatatgttgatacagatgcagacttgagaatattacgccgtttaacacgagatactaaagagcgtgggcgttcaatggactctgttatcaatcaatatttaagtgttgttagacctatgcatgaccaatttattgaaccgactaagaaatatgctgatataattattcctgaaggtgggagcaataaagttgcaatagatattatgacaacaaaaattcagtctttagttagcaagcaatagtataattcagtaaaggaagatgacaatatggaaaatcaaaagcaatatccaatgactcaagaaggttttgaaaaattagagcgtgaacttgaagaattaaaaacagttaagcgtcctgaagttgtagagaaaattaaagttgcacgttcatttggtgacttatcagagaactctgagtatgatgcagcaaaagatgaacaaggattcatcgaacaagatattcaaagaattgagcatatgttaagaaatgcattaatcattgaagatactggagataacaacgttgttaaaattggtaaaacagtaacgtttgtagaattaccaggtgatgaagaggaaagttatcaaatcgttggttcagctgaatcagatgcatttaatggtaagatttcaaatgaatcaccaatggctaaagcgttaattggtaaaggtttagatgatgaagttcgtgttccactacctaatggtggcgaaatgaacgtaaaaattgttaatatccaataa

SEQ ID NO: 90 - DNA, 3709 bp, Staphylococcus aureus
atgaaaaagttaaaagcgagtgaaattagacaaaaatatctagatttctttgttgaaaaaggacatatggttgaaccttctgcaccattagtgccaattgatgatgatacattattatggattaattcaggtgtagcaacattaaagaaatattttgatggacgtgaaacacctaaaaagccaagaattgtaaactctcaaaaagctattcgtacaaatgatattgaaaatgttggtttcacagcgcgtcaccatacattctttgaaatgttaggtaacttctcaattggtgattattttaaacaagaagcgattgaatttgcttgggaatttttaacgagtgataaatggatgggtatggagccagataaattgtacgttacgattcatccggaagatatggaagcatataacatttggcataaagatattgggcttgaagaaagtcgtattattcgcattgaaggtaacttctgggatattggtgaagggccttcaggaccgaacactgagattttctatgatcgcggagaagcatatggacaagacgatccggcagaagaaatgtatccaggtggagaaaatgaacgctatcttgaagtatggaacttagtatttagtgaattcaatcataataaagatcatagttacacaccattacctaataaaaatattgataccggcatggggcttgagcgtatggcctcagtttctcaaaatgtacgtactaactatgaaacagatttatttatgcctataatgaatgaaatcgaaaaagtatcaggtaaacaatatttagtaaacaacgaacaagatgtggcatttaaagtaattgctgaccacattcgtacgattgcatttgcaatttctgatggtgcattacctgccaatgaaggtagaggatatgtattacgtcgattgttacgtcgtgccgttcgttttagtcaaacgttaggaatcaatgagccatttatgtacaaacttgttgatattgttgcagacattatggaaccatattatccaaatgttaaggaaaaagcagatttcattaagcgtgttataaagtctgaagaagaacgattccatgaaacattagaagatggtttagcgattttaaatgaattaattaaaaaagctaaagcgacaacaaatgaaattaatgggaaagatgcatttaaattgtatgatacgtacgggttcccaattgaattaactgaagaaatagcagtgcaagcaggattgaaagttgatatgacaacatttgagtcagaaatgcaacaacaacgtgatcgtgcacgtcaagcacgtcaaaattctcaatcaatgcaagttcaaagtgaagtattgaaaaatattacatctgcaagtacttttgttggttatgatactgcgacagctcaaacaacactaacacacttgatatataatggtgaagaagtttcacaagttgaagcgggtgaaacagtatacttcatgttaacggaaacaccattttatgcagtcagtggtggacaagttgcggatacaggtattgtttataatgacaattttgaaattgctgttagtgaagtaaccaaagcaccaaatggtcaaaacttgcataaaggagtagtacaatttggccaagtaaatgttggcgctacagtgtctgctgaagtgaaccaaaatgatcgacgtgacattcaaaagaaccatagtgcaacacatttattacatgcagcgttgaaatcagtactgggtgatcatgttaaccaagctggttcactagtagaagcagatcgtttacgttttgatttctctcattttggtccaatgactaatgatgaaattgatcaagttgaacgcttagtaaatgaagaaatttggaaaggtattgacgttaacattcaagaaatggatattgcttcagctaaagaaatgggcgcaatggcattattcggtgaaaaatatggtgatgttgtgcgtgtagtaaatatggcaccattttcaattgaattatgtggtggtattcatgtccgcaatacttctgaaattggcttattcaaaatagtaagtgagtcaggtacaggagctggtgtgcgtcgtattgaagcattaacaggtaaagcagctttcttatatttagaagatattcaagagaaatttaatacgatgaaatcacagatgaaagtgaaatctgatgatcaagtagtcgaaaagttaacacaattacaagatgaagaaaaagcattattaaaacaattagagcaacgtgacaaagaaatcacatcacttaaaatgggtaatattgaagatcaagttgaagaaatcaatggctataaagtattggttactgaagtggatgtaccaaatgcgaaagcaattcgctcgacaatggatgattttaaatctaaactacaagatacaattatcattcttgcaagtaatgttgatgataaagtatcgatggttgcaactgtccctaaatctttaacaaataacgttaaagccggtgatcttatcaaacaaatggcaccaatcgttggtggtaaaggtggcggtcgtccagatatggctcaaggtggcggtacacaacctgaaaatatctcaaaatcattaagctttattaaagattacattaaaaatctataatttaaagccataatattgtatgatgatagtgagttatatttgtaattaaaggagtgtcgcaaatggaaaactttgataaaacaatgaaattcgactatgaagaacttccaacgcaagatgtaagagatgttttaaataatgtttatcgaacattagatgaacgaggatataatgccgtaaaccaaattgtaggttatttattatcaggtgaccctgcgtatattccacgccagaatgaagcaagaaatcaaattcgtcatattgatagagatgttattatggaagaacttgtttcttactatttaaaagagcaaaataaataatttatgttacaacataaaattttaggactcgatgtcggtagtagaacggtaggaattgcaattagtgatataatgggttggacggcacaaggattagacacactccgaatcaatgaagaaaataatgaattaggtattgaccaattagtagacattattaaaaaacataatgtgggtacagtcgtaataggactacctaaaaacatgaataattcaataggatttcgaggcgaagcttcgttaacatataaagaaaaattattagaagcttatccttctattgagattgtgatgtgggatgaaagattaagcacaatggctgctgaacgatcattattagaagcagatgtttcaagacaaaaaagaaaacaagtgattgataaaatggcagcggtatttattttacaaggctatttagattcactacattaaaaggagattttactatgactgaacataatcatgattcacaactagaaattaataacgaagaagaattattaactttattcgatgaagagggaaatgaagttttataccgaaaagttttagaattttatcatcctgaattcaaaaaagagtatgttatcttagctgaagaaggtgctcaatcagatgaagacgatatgattgagcttgtaccaatgatcaatgaaccagatgagtcaggtgacggtggtaagttagtaccaatcgaaactgatgaagaatgggacatgattgaagaagttgtaaatactgaaatggaagaataa

SEQ ID NO: 91 - DNA, 2631 bp, Staphylococcus aureus
atgaaaaagttaaaagcgagtgaaattagacaaaaatatctagatttctttgttgaaaaaggacatatggttgaaccttctgcaccattagtgccaattgatgatgatacattattatggattaattcaggtgtagcaacattaaagaaatattttgatggacgtgaaacacctaaaaagccaagaattgtaaactctcaaaaagctattcgtacaaatgatattgaaaatgttggtttcacagcgcgtcaccatacattctttgaaatgttaggtaacttctcaattggtgattattttaaacaagaagcgattgaatttgcttgggaatttttaacgagtgataaatggatgggtatggagccagataaattgtacgttacgattcatccggaagatatggaagcatataacatttggcataaagatattgggcttgaagaaagtcgtattattcgcattgaaggtaacttctgggatattggtgaagggccttcaggaccgaacactgagattttctatgatcgcggagaagcatatggacaagacgatccggcagaagaaatgtatccaggtggagaaaatgaacgctatcttgaagtatggaacttagtatttagtgaattcaatcataataaagatcatagttacacaccattacctaataaaaatattgataccggcatggggcttgagcgtatggcctcagtttctcaaaatgtacgtactaactatgaaacagatttatttatgcctataatgaatgaaatcgaaaaagtatcaggtaaacaatatttagtaaacaacgaacaagatgtggcatttaaagtaattgctgaccacattcgtacgattgcatttgcaatttctgatggtgcattacctgccaatgaaggtagaggatatgtattacgtcgattgttacgtcgtgccgttcgttttagtcaaacgttaggaatcaatgagccatttatgtacaaacttgttgatattgttgcagacattatggaaccatattatccaaatgttaaggaaaaagcagatttcattaagcgtgttataaagtctgaagaagaacgattccatgaaacattagaagatggtttagcgattttaaatgaattaattaaaaaagctaaagcgacaacaaatgaaattaatgggaaagatgcatttaaattgtatgatacgtacgggttcccaattgaattaactgaagaaatagcagtgcaagcaggattgaaagttgatatgacaacatttgagtcagaaatgcaacaacaacgtgatcgtgcacgtcaagcacgtcaaaattctcaatcaatgcaagttcaaagtgaagtattgaaaaatattacatctgcaagtacttttgttggttatgatactgcgacagctcaaacaacactaacacacttgatatataatggtgaagaagtttcacaagttgaagcgggtgaaacagtatacttcatgttaacggaaacaccattttatgcagtcagtggtggacaagttgcggatacaggtattgtttataatgacaattttgaaattgctgttagtgaagtaaccaaagcaccaaatggtcaaaacttgcataaaggagtagtacaatttggccaagtaaatgttggcgctacagtgtctgctgaagtgaaccaaaatgatcgacgtgacattcaaaagaaccatagtgcaacacatttattacatgcagcgttgaaatcagtactgggtgatcatgttaaccaagctggttcactagtagaagcagatcgtttacgttttgatttctctcattttggtccaatgactaatgatgaaattgatcaagttgaacgcttagtaaatgaagaaatttggaaaggtattgacgttaacattcaagaaatggatattgcttcagctaaagaaatgggcgcaatggcattattcggtgaaaaatatggtgatgttgtgcgtgtagtaaatatggcaccattttcaattgaattatgtggtggtattcatgtccgcaatacttctgaaattggcttattcaaaatagtaagtgagtcaggtacaggagctggtgtgcgtcgtattgaagcattaacaggtaaagcagctttcttatatttagaagatattcaagagaaatttaatacgatgaaatcacagatgaaagtgaaatctgatgatcaagtagtcgaaaagttaacacaattacaagatgaagaaaaagcattattaaaacaattagagcaacgtgacaaagaaatcacatcacttaaaatgggtaatattgaagatcaagttgaagaaatcaatggctataaagtattggttactgaagtggatgtaccaaatgcgaaagcaattcgctcgacaatggatgattttaaatctaaactacaagatacaattatcattcttgcaagtaatgttgatgataaagtatcgatggttgcaactgtccctaaatctttaacaaataacgttaaagccggtgatcttatcaaacaaatggcaccaatcgttggtggtaaaggtggcggtcgtccagatatggctcaaggtggcggtacacaacctgaaaatatctcaaaatcattaagctttattaaagattacattaaaaatctataa

SEQ ID NO: 92 - DNA, 1016 bp, Staphylococcus aureus
atggaaaactttgataaaacaatgaaattcgactatgaagaacttccaacgcaagatgtaagagatgttttaaataatgtttatcgaacattagatgaacgaggatataatgccgtaaaccaaattgtaggttatttattatcaggtgaccctgcgtatattccacgccagaatgaagcaagaaatcaaattcgtcatattgatagagatgttattatggaagaacttgtttcttactatttaaaagagcaaaataaataatttatgttacaacataaaattttaggactcgatgtcggtagtagaacggtaggaattgcaattagtgatataatgggttggacggcacaaggattagacacactccgaatcaatgaagaaaataatgaattaggtattgaccaattagtagacattattaaaaaacataatgtgggtacagtcgtaataggactacctaaaaacatgaataattcaataggatttcgaggcgaagcttcgttaacatataaagaaaaattattagaagcttatccttctattgagattgtgatgtgggatgaaagattaagcacaatggctgctgaacgatcattattagaagcagatgtttcaagacaaaaaagaaaacaagtgattgataaaatggcagcggtatttattttacaaggctatttagattcactacattaaaaggagattttactatgactgaacataatcatgattcacaactagaaattaataacgaagaagaattattaactttattcgatgaagagggaaatgaagttttataccgaaaagttttagaattttatcatcctgaattcaaaaaagagtatgttatcttagctgaagaaggtgctcaatcagatgaagacgatatgattgagcttgtaccaatgatcaatgaaccagatgagtcaggtgacggtggtaagttagtaccaatcgaaactgatgaagaatgggacatgattgaagaagttgtaaatactgaaatggaagaataa

SEQ ID NO: 93 - DNA, 2262 bp, Staphylococcus aureus
atggaaatttatgcagattatgctgcgaccacaccagtaaaacctgaagtagtagatgcgatgatgatgatttacaattcgcattatggtaatccatcatcaatacatgctaagggaagagatgcgcgtaaatatttagatgagtcaagacgtcaaattgcacaattacttggtgcagatacacatgaaattatatttacgagtggtgcaacagaatcgaataatacggcaattaaaggcatagtaaaagcaaatgaacaattgggtaatcacattatcacatcgaagattgaacatcattctgtgttacatgtttttgaacaattagagcgagaaggttttgatgtaacatatctagatgttgatgatacaggtgctattgatttagatcaacttgaagaaacaattacagataagacgattttagtatctattatgtttgtaaataatgaagttggcacagtgcaacaaatttatgatattcaagatattattgctgagacaaatgcatatttccatgttgatgcggttcaagcaattggacatcttgatgttaagtttgacgaatttgagatcgacgcaatgagtattactgcacataagtttggcggaccaaaaggtgtcggtgcattattagttaaagaccatgtcacattagattatcctcaacttggcggtgaacaagaattgaaacgccgtgcaggtactgaaaatcttgcacaaattgtcgggatggctaaagcattacaattagcagaaaagaatcgagacgataacaatattcatttaatgaatttaaaagaacaatttttagttaaattacaagaaagagcgattccatttgaattaaatggttcaatgacggatgctacaggccatattgtaaatctatattttccgtttgttgaagttgaaatgatgttaacattgttggatatggcacaaatctatgtgtcgtctggatctgcatgtacagcaggctctacacaaccgtcgcatgttttagatgcaatgttcgaagatgaggagcgatcaaatcattcgattcgatttagttttaacgaattgactactgaaaatgaaattaatgcaattgtagctgaaattcataaaatatattttaaatttaaggaggagtcataattgtcaaataaagatatacgtgttgtcgttggtatgtcaggcggtgtagatagttctgtaacagcccacgtcttaaaagaacaaggttatgatgtcattggcatatttatgaaaaactgggatgacactgacgaaaatggcgtatgtactgcaactgaagattacaacgatgttattgaagtgtgtaatcaaattggcattccatattacgctgttaattttgaaaaagaatattgggataaagtctttacgtatttcttagatgaatacaaaaaaggtcgtactccaaatccagacgttatgtgtaataaagaaattaagtttaaagcctttttagatcatgcgatgaatttaggtgcagattatgtagcaacaggacattacgcacgcatacatcgtcatgaagatggtcatgttgaaatgttacgtggtgtagataataataaagatcaaacatacttcttgaatcaattatctcaacaacaactttcaaaagtgatgttcccaattggcgacatcgaaaagagtgaagtgcgtcgaattgctgaagaacaaggacttgttactgctaagaaaaaagattctacaggcatttgttttatcggcgaaaaaaactttaaaacatttttatcacaatatttacctgcacaaccgggtgatatgataacacttgatggtaagaaaatgggtaaacatagtggtttgatgtattacacaataggacaaagacatggattaggtataggtggagatggcgatccttggtttgttgtcggtaaaaacctaaaagataatgttttatatgtagaacaaggattccatcacgatgcattatacagtgattacttaattgcttcagactattcatttgtaaatccagaagataatgacttagatcaaggttttgaatgtacagctaaatttagatatcgccaaaaagatacgaaagtttttgtgaaacgtgaaaacgaccatgcactacgtgttacttttgctgagccagtaagagcaatcacacctggacaagcagttgttttttatcaaggtgatgtgtgtcttggtggtgcaacaattgacgatgtgttcaaaaatgaaggtcaattaaattttgttgtataa

SEQ ID NO: 94 - DNA, 3045 bp, Staphylococcus aureus
atgattaaaatacctagagggacgcaggatattttacctgaagattcaaagaaatggcgttacattgaaaatcaattagatgaattaatgacattttataattataaagaaataagaacaccaatttttgaaagtacagatctttttgcaagaggtgttggtgattcaaccgatgtcgtacaaaaagaaatgtatacatttaaagataaaggcgatagaagtattacattaagacctgagggaacagctgcagttgtgcgttcatatattgaacataaaatgcaaggtaatccaaaccaaccaattaaactttattacaatggaccgatgtttagatatgaacgtaagcaaaaagggcgctatcgtcaatttaatcaatttggtgtagaagctattggtgctgaaaatcctagcgtagatgcagaagtattagctatggttatgcatatttatcaatcatttggattaaaacatttaaagcttgttattaatagtgtaggggatatggcgtctcgaaaagaatataacgaagcgttagtgaaacactttgaaccagtaattcatgaattttgttcagattgtcaatcacgtttgcatacaaatccgatgcgaattttggattgtaaagttgaccgtgataaagaagcgattaagactgcacctagaatcactgatttcttaaatgaggaatctaaggcatattatgaacaagtaaaagcttatttagatgatttaggtattccatatattgaagatcctaacttagttcgtggattggattattatacacatacagcatttgaattaatgatggataatcctaactatgatggtgccattacaacgctttgtggtggtggccgttataatggtttattagaattgctagatggtccaagtgaaacaggtattggttttgcgctaagtatagaacgattattgcttgcacttgaagaagaaggtatcgaattagatattgaagaaaacttagatttattcattgttacaatgggtgatcaagcagatcgatatgctgtgaagttattaaatcatttgagacataatggtattaaagcagataaagactacttacagcgtaaaattaaaggacaaatgaaacaagcagaccgtttaggtgccaagtttacaatcgttattggtgatcaagaattagaaaataataaaatcgatgttaaaaatatgacaactggtgaatctgaaacaattgaattagacgcattagtcgaatattttaagaagtagagagggcgttaaaatatgagtaagagaacaacttattgtggattagttactgaagcatttttaggacaagaaattacattaaaaggatgggttaacaatcgtcgtgacctaggtggattgattttcgttgatttaagagatagagaaggaattgtacaagtcgtgtttaatcctgcattttcagaagaggcattgaaaattgctgaaacagtacgttctgaatatgttgtagaagttcaaggtacagttacgaagcgtgaccctgaaacagttaatcctaaaattaaaactggccaagttgaagtacaagttacaaatattaaagtgattaataaatctgagacaccaccattttctataaatgaagaaaatgttaacgttgatgaaaatattcgattaaaataccgttatttagatttacgtcgtcaagagttagcgcaaacatttaaaatgagacatcaaattacacgttctattcgtcaatatttggatgatgaagggttctttgacatcgaaacaccagtactaacgaagtcaacacctgagggtgcacgtgactatttagtaccatctcgtgttcatgatggtgaattttatgcattaccacaatcaccacaattatttaagcaattattgatgattagtggatttgacaaatactaccaaatcgtaaaatgcttccgtgacgaagatttacgtgcagatcgtcaacctgaattcacacaagtcgatattgaaatgagttttgtagatcaagaagatgtgatgcaaatgggtgaagaaatgcttaaaaaagttgttaaagaagttaaaggcgttgaaattaatggcgctttcccacggatgacatataaagaagcgatgcgtcgctatggttctgataaaccagatacacgttttgaaatggaattaattgacgtttctcaattaggacgtgatatggactttaaagtatttaaagatactgttgaaaatgatggtgaaattaaagcaattgtcgctaaaggtgcagctgaacaatatactcgtaaagatatggatgctttaacagaatttgtaaacatctatggtgctaaaggattagcgtgggttaaagttgtggaagatggtttgacaggtccaattggacgtttctttgaaacagaaaatgttgaaacattacttacattaactggtgctgaagctggtgacttagtaatgtttgttgcagacaaaccaaatgtcgttgcacaaagtttaggtgcattacgtgtcaaattagctaaagaattaggtttaatcgatgaaacaaaattaaacttcttatgggtgacagattggccattattagaatatgatgaagatgcgaaacgttacgttgcagcacatcatccatttacatctccaaaagaagctgatattgctaagcttggcactgcgccagaagaagctgaggcaaatgcttatgacatagtattaaatggttatgaattaggtggcggttcaatcagaattcatgatggtgagttacaagaaaaaatgttcgaagttcttggatttactaaagaacaagcacaagaacagttcggcttcttactagatgcatttaaatatggtgcaccaccacatggcggtattgcattaggattagaccgattagtcatgttattgactaatagaacaaacttgagagatacaatcgcattccctaaaacagcatctgctacatgtttattaacgaatgcgcctggtgaagtttctgataaacaattagaagaactttctttgcgaattcgtcactaa

SEQ ID NO: 95 - DNA, 11451 bp, Staphylococcus aureus
atgtttgtcgatcaagtcaaaatatctcttaaagccggtgatggtggtaatggtattaccgcatatagaagagaaaaatatgtaccatttggtggaccagctggcggtgacggtggtaaaggtgcttcagtcgtatttgaagtggatgaaggtttaagaacgttattagattttagatatcaacgtcattttaaagcaagcaaaggtgaaaatggccaaagtagtaatatgcatggtaaaaatgcggaagatttagtattaaaagttccacctggtacaattattaaaaatgttgaaacagacgaagtgttagcagatcttgttgaagatggtcaaagagctgtagtagcgaagggcggtcgaggtggccgaggtaattcacgttttgcaacacctagaaaccctgcacctgacttcagtgaaaaaggtgaaccaggtgaggaattagatgtatctttagaattgaaattattagctgatgtaggattagtaggtttccctagtgtgggtaaatcgactttattatctatcgtttcaaaagctaagcctaaaattggggcatatcattttacaacgattaaaccaaatctaggtgttgtttcaacgcctgatcaacgtagttttgttatggcagatttaccaggtttaattgaaggtgcatctgatggcgttggattaggacatcaatttttaagacatgtagagagaacaaaagttattgttcacatgattgatatgagcggttctgaaggtagagaacctattgaagattataaagtcattaatcaagaattagctgcgtacgagcaacgtttagaagatagacctcaaatcgtagtagctaacaagatggatttacctgaatcacaagataatttaaacttgtttaaagaagaaattggcgaagatgtgccagttattccagtttcaacaataacgcgtgataatattgatcaattattatatgcaatagcagataaattagaagaatataaagatgttgacttcacagttgaagaagaggagtcagttggcattaaccgagtattatataaacatacaccgtcacaagataaatttacaatttcaagagatgatgatggtgcttatgtggtaagtggtaatgctattgaaagaatgtttaaaatgactgactttaacagtgatccagcagtacgtcgatttgctcgtcaaatgcgttcgatgggtattgatgatgcacttagagaacgtggttgtaaaaatggtgatatcgttagaattcttggcggagaatttgaattcgttgaataggagcgtaacatgatggacaataaagattataaaaagttttatttaattagagaagatgtcttgcctgaatccgtggttaaaacattgaagattaaagatgccttaaaaagtgatccgacattgtccatttatgatgccgttaaacagtttgatctatctagaagtgctttttataaatatagagaaacgatatttccagtagacgataaaatgcttgaccatcgagaatttacattaattttatatgtaactgatattgtgggtatgttggcacgtgtactagatgttatatcaaagttagaactatctgtattaacgattcatcaaagtattccaatggaagaaaaagcaacaataacattatcactgaatgctaaatctaaagaaacttcagtagaagatgttattggtgctttgagaaatttagattatgtatcaaaagtagaattaattagtatgagtatgtaaggatgtgcctataatgtacgcgtatgtcaaaggtaagttaacacatttatatcctacacacgtagttgttgaaactgctggtgttggttatgaaattcaaacaccaaattcttatcgttttcaaaagcatctagatcatgaagttttaattcgtacatctttaattgttcgtgaagatgcacaattattgtatggatttagtagtgaagaagagaaagatatgttcttgagtttaattaaagttactggtattggtccgaaatcagctttagctattttagcgacaagtacgcctaatgaagtaaaacgtgccattgaaaatgaaaatgatacgtatttaactaaattcccaggaattggtaagaaaacggcaagacagattgtcttagatttaaaaggtaaagtgaaaatcactgaagaagatagcgattcattattacaagtagacgctacttcgacggtgcaagatcaattcgtgcaagaagcaatgttagcgttagaagcattaggttattctaaacgagagcttgcaaaagttgagaaaacgttaaataaaaataaatatgactcagttgatgaagctgttaaggcaggtcttcaattagttgtatcttaattttaaatagattaataggggaagtgttgtcatgaatgagcgtatggttgatcaatcaatgcatagtgaagaaactgatttcgaattgtcgcttagacctacgagattacgacaatatattggtcaaaattcaataaaaagtaatttagaagtatttattaaagcggctaaacttcgtcatgaaccattagatcatgtattgctttttggcccccctggattaggtaagacaacattatctaatatcattgccaatgaaatggaagttaatatacgtacagtatcagggccttcattagaaagacctggtgatttggctgcaattttatcaggacttcaacctggagatgtattgtttattgatgaaatacacagactgagtagtgttgttgaagaagtgttataccctgcaatggaagatttctttttagatattatcattggtaaaggcgatgaggctagaagtatccgtatcgacttacctccattcactttggtaggtgcaacaacgcgagctggcagcttaacaggtccactaagggatcgatttggtgtgcacttaagattagaatattataatgaatcagatttaaaagaaatcattattagaacagctgaggttttaggcacaggtattgatgaagaaagtgccattgaacttgctaaacgttctagagggactccaagagtagcaaatcgactattgaagcgggtaagagacttccagcaagtgaatgaagatgaacaaatatacattgaaacaacgaagcacgcattaggtttacttcaagttgatcaacacggactagattacattgatcataaaatgatgaactgtattattaagcagtataatggtggacctgttggtttagatacgattgccgtaacaattggtgaagaacgtattacaattgaggacgtttatgagccatttcttattcagaaaggctttttagaacgtacgccacgtggcagaaaagcaacaccattagcttatgaacattttgcaaagtcgaatgaggagagaggataacgtgaatattgaagaatttgactatgacttaccagaatcattaattgctcaaacgcctttaaaagatcgtgatcatagtcgtttattagtcatggatagagaaactggtgaaatgaaacatttacatttcaaagatatcattgagtattttagacctggtgatacattagtgcttaacgatacgcgagtaatgccagctagactttttggtttaaaagaagaaactggtgcaaaagttgaaatgttaatgttaactcaaattgaaggtaatgattgggaagtcttactgaaaccagctaagcgtattaaagttggtaataaattgaattttggtaatggcaaaattatagctgagtgcataaaagaaatggatcaaggtggacgcatcatgcgtttacattatgaaggtattttacaagaaagattagatgaattaggggaaatgccactgccaccatacatcaaagaacgtttagatgatccagatcgttatcaaacagtttacgctaaagaaagtggttcagcggcagcaccaacagcaggattacattttactgatgagttattaactgaaattaaaaataaaggcgttaatatcgcatttgttacattacatgttgggttaggtacgtttagaccggtgagcgtcgatgatgtgaatgaccacgaaatgcatagtgaatattatcaaatgacacaagaaacagctgatttattaaatgatactaagtccaaaggacatcgcattatatcagttggtacaacttcaacacgtacacttgaaacaattcgacgcgatcatgataaatttgttgaaacgagtggctggactaatatatttatttatccaggatttgattttaaagcaattgatggccagattactaattttcatttaccaaaatcaacattagttatgctagtatcagcgtttagtactcgtgaaaatgttctgaatgcttataaaacagcagtaaatttagaatatagattctttagttttggcgatgcaatgttaattatataaaaagaatgtgaggattttgaatatgcctgcagtaacatacgaacacattaaaacttgtaaacaatcaggtgcgcgtttaggtatcgtgcacacaccacacggttcatttgaaacacctatgtttatgccagttggtactaaagcaaccgttaaaacaatgagtccagaagagttaagacaaattgaagcaaaaatcattttgggcaacacatatcatttgtggttacaacccggaaatgatattatcaaacacgctgggggattacataaattcatgaattgggatggtccgattcttacagattcaggcggtttccaagtgtttagtttaagtaatttacgtaaaattacagaagaaggcgtggaatttagacatcatactaatgggtctaaattatttttgagtcctgagaaatcaatgcaaattcaaaatgatttaggatctgatattatgatggcatttgatgaatgtccaccgatgcctgctgaatatgattatgtaaaaaaatctattgaacgtacaacacgttgggcgaaaagatgtctagatgcacaccaaagacctgaagatcaagcattgttcggcattatacaaggtggcgaatatgaagatttaagagaacaaagtgcaaaggatttagtagaattagattttcctggttatgcaatcggcggtttgtcagttggtgaacctaaaccggttatgtataaaatggttgaacatacagagcagtttatgcctaaagataaaccaagatatttaatgggtgtaggatctccagatgcgttaatcgaatgtagtattcgcggcatggatatgtttgattgtgtcttaccgacacgtattgccagaaatggtacttgtatgacatcgcaaggtcgtttagttattaaaaatgcaaaatttgcagatgatttaagaccgttagatgagaattgtgactgttatacatgtcaaaactattcaagagcgtatatacgtcatttaatcaaggcagaggaaacttttggtattcgtcttactactattcataatttacattttctgctaaaattaatggaagatataagacaagccattcgagaagatcgtcttttagatttcaaagaagaattcttcgagcaatatggattaaatgttgagaacccaaaaaacttttaagcaagaggagcgtataaaatgcaattttcattactaatatatatagtcgtaatttttgcggttatgtatttcttgatgatcagaccacaacaaaaacgtgcgaaacagcatcgtgagttgattaataacattcaatctggtcaaagaattacaactattggtggtattaaaggtactgttaaagcagtagatgaaacaactgttgttattacagttaatggtcatggtactgaattaactttcgaaaaacctgctattaaacaagttgacccttcataacgagaagtggtattaaaaaggatgaaacgaatagcgtttcatcctttttaagttataagtagtatgtagaatagcttatttttattccaaaaaaagaaattgtgatacataataattgttaaatttaaattaaatatatctatgactatttttactccctgctctagtatgttaatatgtataaggctaataaattttgtaagaaagatttaacttgcgttataaaatagtattcaagtattctaaatacatacgtaaataatgaggtgttcatgtgaagaaaagtagtagaataattgcgttcttgcttttagtcgtattgttgtttgccggaatggctgcaacttataaaagtgttataaagaatgtcaatttaggacttgatttgcaaggtggatttgaggtgctttatcaagtcgatcctttaaataaaggcgacaaaatagataaaaaagccttacaatcaacagcgcaaacattagaaaatcgtgttaacgttttaggtgtttcggaacctaaaattcaagttgaagaacctaatagaattagagttcaacttgctggtgtaacagaccagaatgaagcacgtaaaattttatcttctcaagctaatttaacaattcgcgatgcagaagataaagtaaaattaagcggttctgatattaaacagggatctgccaaacaagaatttaaacaggaaacaaaccagcctacagttacttttaaagtaaaagacaaaaacaaatttaaaaaagtaacggaagaaatctctaagaaacgtgataatgtcatggttgtttggttagatttcaaaaaaggtgacagctataaaaaagaagcacaaaagaaaaaccctaaatttatttctgcagcaagtgttgatcaaccaatcaattctgatagcgtagaaatctcgggtggatttaaaggacaagaaggcgttaaaaaagcaaaacaaatcgccgaattgttaaatgcaggttctttaccagttgacttgaaagaaatttattcaaactcagtaggtgcccaatttggtcaagatgcattagataaaactgtgtttgcatcgtttattggtgtagcattaatttatttattcatgcttggattctaccgattacctggtttagtagcgattattgcattgacaacttatatctatctaacgttagtagcatttaatttcatttccggggttctaactttaccaggattagcggcgttggtattaggtgtaggtatggctgtagatgccaatattatcatgtatgagcgtattaaggatgaacttcgaataggtagaacgataaagcaagccttttctaaagcaaacaaaagttcattcctaacaatttttgattctaacttaacaacagttatcgccgcagcagtattattcttcttcggtgaaagttcagttaaaggtttcgcgacaatgttattattaggtattctaatgatctttgttacagccgtgttcttatcaagattcttattatcattacttgtttcatcaaatatattcaaaaatcaattttggttatttggtgttaaaaagaataaacgacatgatattaatgaaggtgtagatgttcatgaccttaaaacttcattcgagaaatggaattttgttaaattagctaagccattaattggagtaagtattttaattgtagttgtcggtttagttattctttatatcttcaagttaaacttaggaattgatttctcaagtggtacacgtgtagatttccaatctaaacaagcaattactcaacaaaaggttgagcaagttgtaaaagatagtggacttaaagcggatcaaattcaaatcaatggtaaagataataaagtagcaactgttcaatttaaagacgatttaacgcgtgctcaagataataaattgagtgataatattaaatcgaaattcggtgacacacctcaaattaatactgtatcaccaattattggacaggaattagcaaaaaatgcaatgcttgcattaatctatgcatcgataggtatcatcatctatgtatcattacgatttgaatggcgcatgggtctttcatctgtattggcattattacatgatgtattcattatagtagcgattttcagtttatttagaattgaagtagatttaacatttatcgccgctgtattaacaattgtcggttattcaattaatgatacaatcgtaacgtttgaccgtgtacgtgaaaacttacaaaaggttaaagtgattacgacaacagaacaaattgatgatatcgttaatagatcaattagacagacaatgacacgttcaattaatacagtattaacagttattgtagtagtagttgctatactattcttcggtgctcctacgatattcaactttactttagcattatttatcggattgatttctggtgtattctcttcaatcttcattgccgttccgctatggggaataatgaaaaaacgtcagttgaaaaaatcgccgaaacacaaattagttgtatataaagaaaagaaatcgaacgatgaaaagattttagtttaaaatgaattaagcggtatgtgaaacaataaagagttcacataccgctttttactttatttaaatttaacaaaatatatataaataagttcccgcattcatttttaaaaaatggtataattaaagacttgattatttagataagtgctttttatttaaagtaattttagatataatgtcttttggaaatgaggcgtaaatatatatgattaaaccgaagtataagtggaaattaactaaaccagctgaatacataagtgatgaattaacatcaaaattaaagttaacgccaatcgtaaaaaaaatattagaaagtaaatcgattattgatgaacaagcaattgaatccatcatttcagacacagatgtcaatcatgatgcattgcaattgagcgatatgactaaggctattgaaagaattaaaagagcgatagcgaatgatgagaaaatcctagtttatggtgattacgatgccgacggtgttacctcaactacaattttagtgacaacattacaacttttaggtgcacaagtaggatggcatattcctaaccgctttaccgaaggatatggaccaaacgaactagcatttagaaatgctcatgatgaaggcataacattaatcataactgttgataatggcatacaaggtcataatgaaattaaaatggttcaagatttaggagttgatgtcattgtaactgatcatcatgaaattggtagtacattaccagaagcatatgcaatcgtacatccaatgcatccatcgtttaattatccgttccaacaattgtgtggtgcaggtgttgcatacaaattagcacaagcattgattgaaaatgtacctgattattttaaagcattagttgcgataggtaccattgcggatttagtatccttaactgatgaaaatcgatcattagtgaaacaaggattaaaagtcttaaatgatcaatgtccgacctctgttaaagcattgctaaaagaagcgggatacaatgacaatattgatgaagaaacaattggttttattattggacctagacttaatgctgtaggtcgtttagatgacgcatcattagcttgcgaattgttgatgactgacgacgaagaagaagctgcatttttagcagaacaagttgaacattttaaccgtgaaagaaaagatattgtagcaactatcacagaagaagcaatggctatggcagaaacgaaagttaaaaagggagatttatttttacttttagcaaaagaaaattggcatgaaggtgtcttaggtattgttgcttcgaaaattgtcgaaacatttgctttgccaacattaattttaaatattgatagggagcaaaatcatgcaaaaggttccgccagatcaattgatcaagtgtcgatgtttgaaatactatcagcacatcaagagttaatcgctaaatttggcggccatcatatggctgcaggtatgacgatggatattgaaaatatagaatcgttagctgaaggtttaaataaatggatgaaagaattatctaaaacaacttcgttagatcccgtaaagccagtagacgtattattaacagaaaatgatataacgattaaaaatattcgtgatatgaatcgtttaagacccttcggaacagatttttctagacctatttttgaaatggatgatttatcagtttcttcagttaaggcgatcggtcaacaaaaaaatcatctaaaattgacacttggtgaaagtaatatcgccgcgctattttggcaaaatggacacttagaacctgagttacaagatgaacagccaattaatatattaggatctgttcaaatcaacgaatggaatggtaatcaatcaccgcaattaattattcaagatattgcgatgaatgaacagcaaatattagattatagaagtaagcgaaaaagtttaccttttacagaaaatgatgaaaatattgtcgtgcttattcatcctaaaagtgataaagtaaatgcgaatgaatattattatggtgaagaaattaaacaacaaactgataaagtagtattaagagatttaccaacgtcaatggaagacttgtctaattccttgcaacaactgcaattttctcaactttatatagttttgcaacataatcattcgatttacttcgatggtatacctaatatggatatttttaaaaagtgttataaagcattaataactaaacaagaaacaaatatccagaaagagggtatgttattgtgtcaacatttaagtgtgaaaccagatacacttaaattcatgttgaaagttttcttagacttaaaatttgtaacacaagaagatggtttaattcgaatcaatcaacaacctgataaaagatcgattgattccagcaaagtatatcaattaagacaacaacgtatggatgttgaaaagcaattattatatcaagatttttcagaaataaaaaattggataaagtcacaattgtcgtgagcaatttaggaggaaatattaatggatttaaagcaatacgtatcagaagttcaagattggccgaaaccaggtgttagtttcaaggatattactacaattatggataatggtgaagcatatggctatgcaacagataaaattgtagaatacgcaaaagacagagatgttgatatcgttgtaggacctgaagcgcgtggctttatcattggctgtcctgtagcttattcaatggggattggctttgcacctgttagaaaagaagggaaattacctcgtgaagtcattcgttatgagtatgacctagaatatggtacaaatgttttaacaatgcacaaagatgcaattaaaccaggtcaacgtgtgttaattacagatgatttattagctactggtggtacgattgaagcagcaataaaattagttgaaaaattaggcggtatcgtagtaggtattgcatttataattgaattgaaatatttaaatggtattgaaaaaattaaagattacgatgttatgagtttaatctcatacgacgaataa

SEQ ID NO: 96 - DNA, 931 bp, Staphylococcus aureus
atgtttgctattattgaaacaggtggaaaacaaatcaaagtagaagaaggtcaagaaatcttcgttgaaaaattagacgtaaacgaaggagatacttttacatttgataaagtattatttgtaggtggagattcagttaaagttggagcgccaacagttgaaggtgcaacagttactgctactgttaataaacaaggtcgcggtaaaaaaatcactgtattcacatacaaacgtcgtaaaaattcaaaacgtaaaaaaggccatcgtcaaccatacactaaattaacaatcgataaaatcaacgcgtaattattatgattactgttgatattacagttaatgatgaaggcaaagtaacagacgttattatggatggccatgctgaccatggtgaatatggtcatgatatcgtttgtgctggagcttcagctgtattgtttggtagtgttaatgcgattataggattgacatctgagagaccagatatcaattatgacgacaatggtggtcattttcatataagaagcgttgatacaaataacgatgaagcgcaactaattcttcaaacaatgcttgtgtctttacacactattgaagaagaatataatgagaatattagattaaattataagtgtggtgcatcacgatggtgaaaatagacttacaattcttcgcatctaaaaaaggggtaagttctacaaaaaacggacgtgactctgaatcaaaacgcttaggtgctaaacgtgctgacggtcaattcgtaacaggtggttcaattttatatcgccaacgtggtactaaaatttaccctggtgaaaatgtaggtcgtggtggcgatgatacattattcgctaaaatcgacggcgttgttaaattcgaacgtaaaggtcgcgacaaaaaacaagtttctgtatatgcagtagctgaataa

SEQ ID NO: 97 - DNA, 5443 bp, Staphylococcus aureus
atggaaatgaaaccaaaatatgatcctcgtgaagttgaagcgggacgttatgaagaatgggtaaagaatggttattttaaaccgtcagaagataaatcaaaagaaacatatacaattgttatcccgccaccaaatgtaactggtaaattacatttaggacatgcatgggatacgactttacaagatatcattacacgtatgaaacgtatgcaaggatacgatacgttatacttaccaggtatggatcatgctggtattgcgacacaggcaaaggtagaagctaaattaaatgaacaaggaataactagatatgatcttggtcgtgaaaagtttttagaacaggcatgggattggaaagaagagtatgcgtcatttattcgtgcgcaatgggctaaattaggtctaggtttagattatagtagagaacgttttactttagatgaaggtttaagtaaagcagttaaaaaagtttttgttgatttatacaataaaggaattatttatcgtggcgaacgtattataaattgggatcctaaagcacgtacagctttatctgatattgaagtaatacatgaagatgttcaaggtgcgttttatcattttaaatatccttacgctgatggtgaaggttttattgaaattgcaacaacaagaccagaaacgatgttaggtgatacagcgattgttgttaaccctaatgacgaacgatacaaagatgtaatcggtaaaactgttatattaccaatcgtaggacgcgaactgcctattttagcagatgagtatgttgatatagacttcggttctggtgctatgaaagtgacaccagcacatgaccctaatgattttgaaattggtcaaagacatcaattagaaaatattatcgttatggatgaaaatggtaaaatgaacgacaaagcgggtaaatatgaaggtatggaccgttttgattgtcgtaaacagctagttaaagatttaaaagaacaagatttagttatcaagattgaagatcattttcattctgtaggtcattcagaacgatctggcgctgttgttgaaccatatttatcaacacaatggtttgtgcgcatggaagacttagcgaaacgttcattagataaccaaaaaacagatgatcgtattgatttttatccgcaacgtttcgaacatacatttaaccaatggatggaaaatattagagattggacgatttcaagacaattatggtggggtcatcaaattccggcttggtatcataaagaaacaggcgaaatatatgttggagaagaagcgccaactgatattgaaaattggcaacaagatgaagatgtattagatacgtggttctcaagtgctttatggcctttctctacgttaggttggcctgatttagaaagtgaagactttaaacgatactacccaacaaatgccttagttacaggttacgatattatctttttctgggtcgcacgcatgatattccaaggcttagaatttacagatcgtcgtccatttaatgatgtattattacacggtttagttcgtgctgaagacgggcgtaagatgagtaaatcattaggtaatggtgtggatccaatggatgttattgacgaatacggtgctgatagcttgcgttacttcttagcaacaggttcatctccaggacatgatttaagatactcaactgaaaaagttgagtcagtgtggaactttatcaataaaatctggaatggggcacgtttcagtttaatgaatatcggtgaagactttaaagttgaagatatcgatttaagtggtaacttatcattagcagataaatggattctaacacgtttaaatgaaacgattgcaacagttactgatttaagtgacaaatatgaattcggcgaagttggacgtgcattatataatttcatttgggatgatttctgtgattggtacattgaaatgagtaaaattccaatgaatagtaatgatgaagaacaaaaacaagttacacgttcagtattgagttatactttagacaatattatgagaatgctacatccattcatgccatttgtaacagagaaaatatggcaaagtttaccacatgaaggtgacacaattgttaaagcttcatggccagaagtgcgtgaatcattgatttttgaagaaagtaaacaaacaatgcaacaacttgttgaaatcattaaatctgtaagacaatcacgtgtagaagtaaatacgccattgtctaaagaaatacctattttaattcaagctaaagataaagaaattgaaacaactttatcacaaaacaaagattatttaatcaaattctgtaatcctagtaccttaaatattagcactgacgtggaaattcctgagaaagcaatgacatcagttgtaattgcaggtaaagtggtattaccattagaagggctaattgatatggataaggaaatcagccgtttggaaaaagaattagctaaacttcaaagcgaattagatagagtagataaaaagctctctaatgaaaactttgtaagtaaagcacctgaaaaggttataaatgaagaaaaacgtaaaaaacaagattatcaagaaaaatatgatggtgtgaaggcaagaattgaacaattaaaagcataggagttagtaacaatgaattacctagagagcttgtattggatacacgaaagaactaaatttggcatcaaaccaggtgttaaacgtatggaatggatgctagcacaatttaataatcctcaaaataacattaagggtattcatgtaggtggcacaaatggtaaaggctctacagttgcttaccttagaacagctttagttgaaaatggttatgaagtaggtacatttacgtcgccgtttattgaaacatttaatgaacgaattagtctaaatggtgtgccaatatcaaatgacgctattgtagaattagtatcacgtattaaaccagtaagtgaaatgatggaacgtgaaacagatttaggtgttgcaactgaattcgaaataatcacagcgatgatgtttttatattttggtgaaatacatcctgttgattttgtcattgttgaggctggattgggtataaagaacgattcgacaaatgtctttacaccggttttatcaatcttaactagtatcggtctagaccatacagatattttaggtggtacttatctagatattgctagggataaaggcgcgattataaagcctaacgttccagtgatatatgctgttaaaaatgaagatgcattaaaatatgttcgtgaacgcgcaattgaacaacatgcaaagccaattgaattagatagagaaattgttgttgtatcgcaaaatgatgaatttacttaccgttataaagattatgaattagaaacaatcattttaagcatgttaggtgaacatcagaaacaaaatgctgcattagccataacagctcttattgaattaaatgaacaaggattaattgaattagatttcaataagatgatagacggtattgaatcagttcgttggactggacgtattgagcaggtgcatgacaaacctttaatcattttggatggcgcacataattcagagagtatagatgctctaattgatacaattaaacagtaccatgataaagaaaaagtagatattttgttctcagcaataaacggaaaaccgattaacgagatggtcaaacatttaagtttaattgcgcatacgttttatgcaactgaatttgattttccgaaagcgttacgcaaagaagaaattgtaggtagtattgaaaatgatgaaatacaattagtagatgactacgttgaatttataaaaaattatcaaggtgatacattagtaattaccggtagtctgtatttcataagtgaagttaaatcaaaattagactttgaagcattataaaactaaaactaaaatagccatgaagaatctatttaatcaataggtagagcttcatggttattttttatgctctaaatcgtatgtgtttataaggttcaatttcttgccattattaattttgccgagcagtaatgggttgttaaagtatccatcaattatgcttagcaatattgaaaaatttaaatgaaaaagcggttcaattcttgaaaaatagtgtatatttacattttggtaataactaactataatttacataaggaggttgtcatttggtagtattgttatcttatagctgcagttgtatttttagttttctatatcaatttatatctatagaagaaacgtcatttgattatttacatagaagatcgaaatgtgattattgtaattcgtcactcaaatggtatgaattaatgccgattattagttttttattattaaaagggcgatgtcgaaactgtcgaaagcgtatttccctaacacatttcttaggggaaacctttgctttaatacctatcgtctttattaagtatgatttcacatacgtaaatgctacgctatttataactacatatgtttttctgcttatttttactatgaccgatatcacttctttaatgttagattgtcgcttaattataatttattgtatcgtttctctctcgttaagtatgatttatccagtagcttttatcattattagtatgaccacgcatatattctactttttatttcgggcatatattggttatggtgacgttttactaatatctgcactttctttgtttttccctctccaattcactatttatgtcattttatttacatttgtcattgctggtttagttgctttaattaccatgatatttaagccgattaaactattaccccttgttccatttatatttatttccttttttatcaattcacttttttataatgatatccatcaatttttaggaggcgtatatttttgaaaattaaagaaatggtaacttcagaaatgccaagagaacgtttgttaagccatggtgcaaaaagtctttcgaatacagaattattagctatattaattaacaccggaagaaaaggattctcgagcatagacattagtaatgaactgcttaaatctgcttcgaatctgaatgaattgaaaaaatcttcaattaacgatttgataaaagttaaagggattggattacaaaaagcaattactttaaaagcagcatttgagttaggggaaaggatggggagaagagctgaaaataatcgtataaaaataacgcaaccaagtgatgttgctgattatatgattccaacaatgaaagatttaacacaagaacattttgtcattttattgttaaattcaaaaaatgtagtgattaaagaaacctgtgtttttaaaggtacattaaatagttcgattgtacatccacgtgaaatttttagtattgcggtgagagaaaatgccaatgcaatcatcgcagttcataatcatccatccggtgatgtattaaccatagtataa

SEQ ID NO: 98 - DNA, 12816 bp, Staphylococcus aureus
atgtctaaatttgatgaacaaatcattgtagtacctagagaaattatttttaataatgaaaagaatactttcaatgggtttttaaataagaataaaccagaaggtcaaaatatttttgatgcgctaagtcaatatgaagttaagcgacgcggcgatatggaagaggatccatcatataaacaactcatttcttattgtttacttgaaaatgagcatggcgagatattagtgtatgaacgattatctggcggtggagaagctcgattgcatggacaatcttcaataggtgtaggcggtcatatgaatgatgttccaggagcagaatctattaacgaagtattgagagttaatgcacagagagaattagaagaagaagtaggtttaagtgagcaagattcacaaaatatggaatatatcggttttattaatgacgataataatgaagtgggcaaggtacatattggtgttgtatttaaaatcactgtaagtacgaatgatgtagaagctaaagaaacagatactttacgaataaaatgggttgaaaaaggcaacatagagtcatatgatgatttcgaaacgtggagcgcattaatccttcaagatttataatcaaacgaggtgacatatatgtcagatattattcagtttcctaactcttcgaaaaagttatataaagatataaaacgtgctgaacaagaccaaaactatgacctgatgtatgaatatattgtgcaatatgaacgtcaatttgaactcactgaagaaatagcaatgatgaaatgccgtatgttatatgagacggggtcatttcttgaattaagagaagaaacaattgtcttattgaaaactggcatacaacaatatgatgcattgatgatttattacgtgaaaagtttgattggtttgggacaatattttgaagcggtagaagtaattcatcaaattattgatgaagtcaaagatcacaaaacaagaatggcattacatcctcttaaagaatttgctaagtcaaaattaattgaagatgaaaaacgattgactcagtcattaactgattttgatacgttatcaatgagggaacagacgcacttgattttgaagttaatagacaatggtcattttcaatttcaagaaacggtattatatatattaaaatctaatacgtacagttataacctcattagtttaatgattgagtatttaaggtttgcaaattgtacacaagaactgacaattgaaaagtatggtatggatgtaacttttgtaccagctaatttaaatgggctagaacatacaacactgaaagaaaaagttatacctaacgttatggaaacattaaatgatggtgcattacatatcgctgaagaagcacaccatattatgaataatcactctatcatgatttatccaattgatattgaaactttgtttgaaacgaataaatggattaatgcatacgaatgttatttcaaaaatatgttaggacttaaatgtgaattacaaagtatcgatgcatttaattttattcagcaattagatttgaataataatagttaaattgttgcaaaataatactcagcattttaatatagttttgacgaaaaaagttgatttacaaatatataaacgttgtgatttcaatgtttgtatagggaatagacctatgatataatagggaagttgaaaaaataaattagttaatcatggaggtatatatacatgacagcaacttgggaaaaaaaggaaggtaacgaaggtttattaactgttactgttcctgcagaaaaagtaaacaaagcgttagatcaagcattcaaaaaagtggttaaacaaattaacgtacctggattccgtaaaggtaaagtgccacgtccaatttttgaacaacgctttggtgtagaagcattatatcaagatgctatcgacattttattaccagatgcttatggtgaagcaattgacgaaactgatattaaaccagttgcacaaccagaagtaagtgttactcaaattgaaaaaggtaaagatttcatttttgaagcaacagttacagttgagccagaagttaaattaggagactataaaggtcttgaaattgaaaaacaagaaactgaattatctgatgatgagttacaagaagcgattgaccacagcttaggacatttagctgaaatggtagttaaagaagatggtgttgttgaaaatggcgacacagttaacattgactttagtggttcagttgacggagaagaattcgaaggtggacaagctgaaggttacgatttagaaatcggttcaggttcattcatacctggtttcgaagagcaattagaaggtatgaaagttgacgaagaaaaagatgttgtcgtaacattcccagaagaataccatgctgaagaattagctggtaaagaagcaactttcaaaacaaaagttaacgaaattaaatttaaagaagttccagaattaacagatgaaattgctaatgaattagatgcagaagcaaatacagtagacgagtacaaagaaaacttacgtaaacgtttagctgaacaaaaagctacagatgctgaaaatgttgaaaaagaagaagcgattacaaaagctactgataatacaacaatcgatattcctgaagcaatggttaatactgaattagatcgtatggtgtctgaatttgcacaaagaattcaacaacaaggtttagatttacaaacgtacttccaaatctcaggtcaagatgaaactcaattaagagagcaaatgaaagacgatgcagaacaacgtgttaaaactaacttaactttaactgcgatcgctgaagctgaaaaaatcgaagctactgatgaagatatcgataaagaattagaaaaaatgagtaaacaatttaatatctcagttgaagatatcaaaaatactttaggtaatactgatatcattaaaaatgatgttcgtatccaaaaagttatcgatttattaagagataacgcaaagttcgttgaaggaactaaagaagattaatcttcattaaatattaaattacaaaaatgagtagcagatgcatagcttatgtatctgctactattctttaagcaaaaagtttgtatgttaatatgttgcattgtaatatccaatctagtatagtctttaacgaataggggtgtaaaaagaatgtttaaattcaatgaagatgaagaaaatttgaaatgctctttctgcggaaaagaccaagatcaagtaaaaaaacttgtagcaggaagtggtgtatatatttgtaatgagtgtattgaattatgctcagaaatcgtcgaagaagaattagctcaaaacacttctgaagcgatgacagaattacctactcctaaagaaattatggatcatttaaacgaatatgttattggtcaagaaaaagctaaaaaatctttagctgtagctgtttataaccactataagcgtattcaacaattaggaccaaaagaagatgatgttgaattacaaaaaagtaacattgcattaattgggccaacaggtagtggtaaaacattattagctcaaacattagccaagacgttgaatgtaccatttgcaattgcagatgcgacaagtttaactgaagctggttatgtaggcgatgatgttgaaaatatcttgttgagattaattcaagcagctgactttgacattgataaagccgaaaaaggtattatttatgtagatgaaattgataaaattgcacgtaaatctgaaaacacatctataacacgtgacgtttcaggtgaaggtgttcaacaagcattgcttaaaatcttagaaggtacgactgcaagtgttccgccacaaggtggacgcaaacatccaaaccaagaaatgattcaaattgatacaacaaatatcttatttattcttggtggtgcctttgatggtattgaagaagtgattaagcgccgtcttggtgaaaaagttattggtttctcaagcaatgaagctgataaatatgacgaacaagcattattagcacaaattcgcccagaagatttgcaagcctatggtttgattcctgaatttatcggacgtgtgccaattgtagctaatttagaaacattagatgtaactgcgttgaaaaacatcttaacgcaacctaaaaatgcacttgtgaaacaatatactaaaatgctggaattagatgatgtggatttagagttcactgaagaagctttatcagcaattagtgaaaaagcaattgaaagaaaaacaggtgcgcgtggtttacgttcaatcatagaagaatcgttaatcgatattatgtttgatgtgccttctaacgaaaatgtaacgaaggtagttattacagcacaaacaattaatgaagaaactgaaccagaactatacgacgcagaaggcaatttaattaataatagtaaaacatcagcttaatcattgatgtgttataaaagtgaaaagctccaatcaaagttgacgctcaaatagtttaactttgatcggagcttttttataatgtataccgaaaggttcaaatattatataatggtagagttgaaagagaatataaaaaagtgaggatataaaatgaaagttaatcctaataatattgaattaatcattagtgcagtaaaagaagaacaatatccagaaacagaattgtctgaagttgcactgagcggtcgatctaatgtaggtaagtctacatttatcaatagtatgattggcagaaaaaatatggcacgtacatcacagcaacccggcaaaacgcaaacgttaaatttttataatatagatgaacaacttatttttgtggatgttccagggtatggatatgctaaagtaagtaaaacacaacgtgaaaaatttgggaaaatgattgaggaatatataactaagagagagaatttgcaattagttattcaattagttgatttaagacatgatccaacacaagatgatatcttaatgtacaattatttgaaacattttgatattcctactttagttatatgcactaaagaagacaaaattccaaaaggtaaagttcaaaagcatattaaaaatattaagacacaattagatatggacccagacgatacaattgtaagttattcatcaattcaaaataataaacaacaacaaatatggaatttaattgaaccgtatatttcatagtttttgtacgacaaaacttatacaaaaattttaaaaataatgtaagcacgaaacttttaattagtacacaattgataacatttttcaacgttcatcattttgtcaaaaactcaaaagtaaattagaaagattataatttatttaagcatcgtacttaattggattttaaattatgttataatatttgtattgttagtatatatgggggcgtttcaaatgcattttattgcaattagtataaatcatcgcacagctgatgttgcactaagagagcaagttgcttttagagatgatgccttacgaattgcccatgaagatttatatgaaactaaatctattttagaaaatgtcatattatcaacatgtaatcgaactgaagtatatgctgttgttgatcaaattcacacaggtcgttactatattcaacgatttctagctcgtgcatttggatttgaagtagatgatattaaagcaatgtcagaagtaaaagtgggggacgaagcagtagaacatttattgcgtgtcacttctggtttagattcaatcgtacttggagaaactcaaattttaggtcaaataagagatgcatttttcttagcgcaaagcacaggtacgacaggaacaatttttaatcatctatttaaacaggcaattacttttgcaaaaagagcacataatgaaacagatatagctgataatgctgtaagtgtgtcttatgctgcggtcgagttggcgaaaaaagtatttggcaaattgaaaagtaagcaagctatcattattggtgcaggggaaatgagtgaattatcactattaaatcttcttggttctggaattactgatattacagtagtaaatagaacaattgaaaatgctatgaaattagcagcaaagcatcaagtgaaatatgatgaactatcatcattaccaaatttacttgaaagtgcagatattgtgattagttcaacgagtgcacaatcttatatcattacaaatgaaatgatagaaagaattgcagaaaatagaaagcaagattcactagtattgattgatattgcagttcctcgagatattgaacctggtattagtgccatcacaaacatctttaattatgatgttgatgacttaaaaggtttagttgatgcaaacttacgtgagcgacaattagcggctgcaacaatttcggaacaaattcctgcagaaatacatgcacacaatgagtggattagtatgttgggtgttgttccagtgattagagctttacgtgaaaaagctatggcaattcaagcagaaacgatggacagtattgatcgtaaattgccagggttaagcgaaagagaacgtaaaattatatctaaacatacaaaaagtatcatcaatcaaatgttgaaagatcctattaaacaggccaaagaattaagtagtgataagaaaagtaatgaaaaattagagctatttcaaaatatatttgatatcgaagctgaatgtcctcatgagcaagcgaagcaacaaaaagaaagcaaggtcaaggaaatttcagcgcgacgtatctttagttttgaataagcatattaatatggtgataatatgcaagaaaacctgtttattcgattcaatgaaattatattattaatatacttaatcagtatcatttgctatttttatgattttgtccaaaaaagtcataagattagaagtttaggcatatatttattggggattgtttgggttttacaaacaatctctttatctatttttattatacaaactagacatattccattagggtctatttcagatgtattctatactttaagttggctgattatttcaatctctttaattcttaaccttatcaaagtattgaatttctctgtgtttttcttgaatttaatagggttaacacttttagggatgaatacatttcaaccgacacattatactaataaggttcagaaaattgctgttgtagacgagttactgttagtccatatcggtctagctgtgttaagttatgtcttctttgccttagcttttgtcaatgcattactgtatatcatgcaataccgtaatttgaaggaaaaacgttttgatcaaaaatactttagaataggtagcgttgctacacttgaatcaattgtgttttactcaacgttaagtgggtggataattctcatatttagtattattttaggtacacagtggggtgtaatttcagttggtgaacgtatattcattgacccgaaggtaatactctcttcaattattacagtattatatggaagttatatattgcttagaatcaacaaatggttgaattcaaggtatttaatatactataacattattttattttgcttaaatatgattaatttattttttgcaacacattttgtgaattgagaaaataatctagagcaatccgttcctaggaggaattgaacatgcgtaaattagtcgttggctccagaagaagtaaattagctttaacacaaagccagcaatttattaataaattaaaagctgtcgagccaaatctagaaattgaaattaaagaaattgtcacgaaaggcgatcgtatagtagataaacaattgtctaaagtcggaggcaaaggcttatttgttaaagaaatacaacatgaactttttgaaaaaaatatcgatatggcaatacactcgcttaaagacgtaccaagtgtaattccggaaggtttaacattaggttgtatccctgatagagaattaccttttgatgcgtatatttctaaaacacatacaccactatcccaattgccagaaggcagtattattggtactagttcattacgtcgtggtgcacaaatattatctaagtatcctaatttagagattaaatggattagaggtaatatagatacacgattagaaaagttacaaactgaagattatgatgcgattattttagctgcagctggtttaagaagaatgggctggtcagatgatattgtaacatcttatcttgatagagatacattgttacctgcaatcggacaaggtgctttagggatagaatgtcgtagtgacgatgaagaactattaacattattaagcaaagtacataatgatgaggttgcaaaatgtgtgactgctgaacgaacgtttttagcagaaatggatggtagttgtcaggtgccaatcgcaggatatgctacaatctcagatcaaaaagaaatcgaatttacaggtttaattatgaccccagatggtaaagaacgatttgaatatacaatgaacggaacagatccggttgagttaggcaaaacagtgagtaacaaattaaaagagcaaggtgcttatgaaattataaaacgcttaaatgaacaacattaaataatggagtgacgtttaaatatgaagccagttgtagttatgacacaaacaaatgacatgcaaagtgatttagtatcaattattcacaaaccctttattgatataaagccactaaattttgatattcatttgttaaatcaacgctatgactggcttattttttcatctaaaaatgctgtgaaattcttttataaatatctaaaaggaattaatgttgataacattgctgtgataggaagtaagacagcgcaatattgtgaatcacttggcattcgagttgattttatgccaaacgacttttctcaagaaggatttttaaaatcatttaatcaaactaaccaaaaaatacttttgccttcgagtgaattggcgagaccattgttattagcagcgttatctaaagataatgaagttgttaaaatagatttatatacttcagtgcctaacaaacaaaatatacaagatgttaaagaaatgatagaacatcaacaaatcgatgcattaacattttcaagttcgtcggcagtacgttattattttaatgaaggatttgtaccaaaattcaagtcgtattttgctattggagaacaaacagcacggaccattaaaacatatcaacaaccagtaacaattgcagaaattcaaacactcgaatcactaattgaaaagattttagaaagtaggggctaaaaatgaaatttgatagacatagaagattgagatcatcagcgacaatgagagatatggttagagagaatcatgtaagaaaagaagatttaatatatccaatttttgtagttgaaaaagacgatgtgaaaaaagaaattaagtcattgccaggtgtataccaaatcagtttgaatttacttgaaagtgaattaaaagaagcttatgacttaggcatacgtgccattatgtttttcggtgttccaaactcaaaagatgatataggtactggtgcatacattcacgatggtgttattcaacaggcaacacgtattgctaaaaaaatgtatgatgacttattaattgttgcagacacttgtttatgtgaatatactgatcatggtcattgtggcgtgattgatgaccatacacatgacgttgacaatgataaatcattgccactacttgttaaaacagcaatttctcaagtggaagctggtgctgatattattgcgccaagtaatatgatggatggttttgttgctgaaattcgtcgtggattagatgaagccggctattacaatattcctataatgagttatggtgtcaagtatgcatcaagtttctttggaccttttagagatgcagcagattcagcgccatcatttggggatagaaaaacgtatcagatggaccctgctaaccgtttggaagcacttcgtgaattagaaagtgatcttaaagaagggtgcgacatgatgattgttaaacctgctctaagttatttagacatagttcgagatgttaaaaatcatacgaatgttccagttgttgcatataatgtgagtggagaatatagtatgactaaagcagcggcacaaaatggttggatagatgaagaacgtgtcgttatggaacaaatggtttcaatgaaacgtgcaggtgctgatatgattattacgtattttgcaaaggacatttgtcgctatttagataaataaggttttatatgtatgattttccataaactataggaggaatttactttatgagatatacgaaatcagaagaagcaatgaaggttgctgaaactttaatgcctggtggtgtaaatagtccagtacgcgcatttaaatcagtagatacaccagcaatttttatggatcacggtaaaggctcaaaaatttatgatatcgatggtaacgagtatatcgactatgtactaagttgggggccgcttattttaggacatagagaccctcaagttattagtcatttacatgaagcaattgataaaggtacaagttttggtgcatcaacattacttgaaaataaattggcgcagctcgttattgaccgagtaccttcaatagaaaaagtgcgtatggtgtcatctggtacagaagctacattggatactttaagattagcacgtggttatactggcagaaataaaattgtgaaatttgaaggttgctatcatggtcatagtgattcgttattaatcaaagctggttctggggtggcaacattaggattgccggattctcctggtgtgcctgaaggtattgctaaaaatacaattacagttccatacaatgatttagatgcacttaaaatcgctttcgaaaaatttggagacgatattgctggtgtaatcgtagaacctgttgctggtaatatgggtgtcgtaccaccgattgaaggttttttacagggattaagagatattacgactgaatacggcgcattgctaattttcgatgaagtaatgactggtttcagagtcggttatcattgtgcacaaggttactttggtgtgacaccagatttaacttgcttaggaaaagttatcggtggaggactacctgtaggtgcttttggtggtaaaaaagaaatcatggatcatatagcaccattaggaaatatttatcaagcgggtacgttatcaggaaatcctcttgcaatgacaagtggttatgaaacgttaagccaattaacgccagagacatatgagtattttaatatgttaggcgatatacttgaagacggtttaaagcgtgtatttgctaaacacaatgtaccaataactgtaaatagagcaggttcaatgattggttatttcttaaatgaaggacctgtaactaattttgaacaagcgaataaaagtgatttgaaattatttgcagaaatgtatcgagaaatggcaaaagaaggtgtgtttttaccaccatctcaatttgaaggtacattcttatctacggcacacacgaaagaagatattgaaaaaacgattcaagcatttgatacggctttaagtcgtattgtaaaataaatatacggacaaattgagagcctgaactttgttcaggctctttttaaatgtatatcaggcatgggcggcgacttgatagtgaaagtccatatatgctttgtagtcaaaactgctagcggatattgttatcttaacaaacgtgaagctcaagcagcaatttagtcattttattttttattgaaagaagtggaaaacatgacaatgatatatagaaataatttcattgtgttcgttttatcattttttattagtattatattgtattcatcgcacgtattactcccatttatgtttggtcctattatcgcatcaatcatttgtgtgaaagttttcaaacttgatattaaatggccattcttacttagtgaattagggattgtactattaggggtgcaaatcggatcaacgtttacgaaaaatgtcgttatggatattaaaaacaattggctttcgattattgttgtatctatttcgatattattaattgcaatagtaatggcatttatttttaaaaaaattgcacgtattaatacagaaacagctattttaagtgttataccaggagcactaacacaaatgctggtcatggctgaacaagacaaacgtgctaatttgttagttgttagcttaacgcaaacatcacgaattatatttgttgttgttttagtaccgttcatttcatatttttttcatgatggtaacatgcatgcgaatggaaagttaacaaaagtcttgcctttatcacaagtattaaacatagggcaaatagttattttagcgatagctatctttatagtttatctaattatgtctaaaataaagtttccaacatttcaattattagcaccactcattgtattaattgtttggaatttttctacaggtttaacatttacactagatcattggttgttgaacatggcacaactaatatatatgattagaattggagttcaaattgcgcatttattgtcagatttaaaaggtagactagcaatcgcaattacaattcaaaatattatgttgataattggtgcgctaatcatggtttatatcatacatttctttgataataatcctattaatgaattgtttcttggtgcagcaccaggaggggttaatcagatagttttagttgcattagctactggtgccgatgttgctatgattacgagttatcatattttccgaatctttttcatcctatttattattgcaccaggaattaattactttttaaaatatcgttcgaataagcgtgaagattag

SEQ ID NO: 99 - DNA, 11547 bp, Staphylococcus aureus
atgtctaaatttgatgaacaaatcattgtagtacctagagaaattatttttaataatgaaaagaatactttcaatgggtttttaaataagaataaaccagaaggtcaaaatatttttgatgcgctaagtcaatatgaagttaagcgacgcggcgatatggaagaggatccatcatataaacaactcatttcttattgtttacttgaaaatgagcatggcgagatattagtgtatgaacgattatctggcggtggagaagctcgattgcatggacaatcttcaataggtgtaggcggtcatatgaatgatgttccaggagcagaatctattaacgaagtattgagagttaatgcacagagagaattagaagaagaagtaggtttaagtgagcaagattcacaaaatatggaatatatcggttttattaatgacgataataatgaagtgggcaaggtacatattggtgttgtatttaaaatcactgtaagtacgaatgatgtagaagctaaagaaacagatactttacgaataaaatgggttgaaaaaggcaacatagagtcatatgatgatttcgaaacgtggagcgcattaatccttcaagatttataatcaaacgaggtgacatatatgtcagatattattcagtttcctaactcttcgaaaaagttatataaagatataaaacgtgctgaacaagaccaaaactatgacctgatgtatgaatatattgtgcaatatgaacgtcaatttgaactcactgaagaaatagcaatgatgaaatgccgtatgttatatgagacggggtcatttcttgaattaagagaagaaacaattgtcttattgaaaactggcatacaacaatatgatgcattgatgatttattacgtgaaaagtttgattggtttgggacaatattttgaagcggtagaagtaattcatcaaattattgatgaagtcaaagatcacaaaacaagaatggcattacatcctcttaaagaatttgctaagtcaaaattaattgaagatgaaaaacgattgactcagtcattaactgattttgatacgttatcaatgagggaacagacgcacttgattttgaagttaatagacaatggtcattttcaatttcaagaaacggtattatatatattaaaatctaatacgtacagttataacctcattagtttaatgattgagtatttaaggtttgcaaattgtacacaagaactgacaattgaaaagtatggtatggatgtaacttttgtaccagctaatttaaatgggctagaacatacaacactgaaagaaaaagttatacctaacgttatggaaacattaaatgatggtgcattacatatcgctgaagaagcacaccatattatgaataatcactctatcatgatttatccaattgatattgaaactttgtttgaaacgaataaatggattaatgcatacgaatgttatttcaaaaatatgttaggacttaaatgtgaattacaaagtatcgatgcatttaattttattcagcaattagatttgaataataatagttaaattgttgcaaaataatactcagcattttaatatagttttgacgaaaaaagttgatttacaaatatataaacgttgtgatttcaatgtttgtatagggaatagacctatgatataatagggaagttgaaaaaataaattagttaatcatggaggtatatatacatgacagcaacttgggaaaaaaaggaaggtaacgaaggtttattaactgttactgttcctgcagaaaaagtaaacaaagcgttagatcaagcattcaaaaaagtggttaaacaaattaacgtacctggattccgtaaaggtaaagtgccacgtccaatttttgaacaacgctttggtgtagaagcattatatcaagatgctatcgacattttattaccagatgcttatggtgaagcaattgacgaaactgatattaaaccagttgcacaaccagaagtaagtgttactcaaattgaaaaaggtaaagatttcatttttgaagcaacagttacagttgagccagaagttaaattaggagactataaaggtcttgaaattgaaaaacaagaaactgaattatctgatgatgagttacaagaagcgattgaccacagcttaggacatttagctgaaatggtagttaaagaagatggtgttgttgaaaatggcgacacagttaacattgactttagtggttcagttgacggagaagaattcgaaggtggacaagctgaaggttacgatttagaaatcggttcaggttcattcatacctggtttcgaagagcaattagaaggtatgaaagttgacgaagaaaaagatgttgtcgtaacattcccagaagaataccatgctgaagaattagctggtaaagaagcaactttcaaaacaaaagttaacgaaattaaatttaaagaagttccagaattaacagatgaaattgctaatgaattagatgcagaagcaaatacagtagacgagtacaaagaaaacttacgtaaacgtttagctgaacaaaaagctacagatgctgaaaatgttgaaaaagaagaagcgattacaaaagctactgataatacaacaatcgatattcctgaagcaatggttaatactgaattagatcgtatggtgtctgaatttgcacaaagaattcaacaacaaggtttagatttacaaacgtacttccaaatctcaggtcaagatgaaactcaattaagagagcaaatgaaagacgatgcagaacaacgtgttaaaactaacttaactttaactgcgatcgctgaagctgaaaaaatcgaagctactgatgaagatatcgataaagaattagaaaaaatgagtaaacaatttaatatctcagttgaagatatcaaaaatactttaggtaatactgatatcattaaaaatgatgttcgtatccaaaaagttatcgatttattaagagataacgcaaagttcgttgaaggaactaaagaagattaatcttcattaaatattaaattacaaaaatgagtagcagatgcatagcttatgtatctgctactattctttaagcaaaaagtttgtatgttaatatgttgcattgtaatatccaatctagtatagtctttaacgaataggggtgtaaaaagaatgtttaaattcaatgaagatgaagaaaatttgaaatgctctttctgcggaaaagaccaagatcaagtaaaaaaacttgtagcaggaagtggtgtatatatttgtaatgagtgtattgaattatgctcagaaatcgtcgaagaagaattagctcaaaacacttctgaagcgatgacagaattacctactcctaaagaaattatggatcatttaaacgaatatgttattggtcaagaaaaagctaaaaaatctttagctgtagctgtttataaccactataagcgtattcaacaattaggaccaaaagaagatgatgttgaattacaaaaaagtaacattgcattaattgggccaacaggtagtggtaaaacattattagctcaaacattagccaagacgttgaatgtaccatttgcaattgcagatgcgacaagtttaactgaagctggttatgtaggcgatgatgttgaaaatatcttgttgagattaattcaagcagctgactttgacattgataaagccgaaaaaggtattatttatgtagatgaaattgataaaattgcacgtaaatctgaaaacacatctataacacgtgacgtttcaggtgaaggtgttcaacaagcattgcttaaaatcttagaaggtacgactgcaagtgttccgccacaaggtggacgcaaacatccaaaccaagaaatgattcaaattgatacaacaaatatcttatttattcttggtggtgcctttgatggtattgaagaagtgattaagcgccgtcttggtgaaaaagttattggtttctcaagcaatgaagctgataaatatgacgaacaagcattattagcacaaattcgcccagaagatttgcaagcctatggtttgattcctgaatttatcggacgtgtgccaattgtagctaatttagaaacattagatgtaactgcgttgaaaaacatcttaacgcaacctaaaaatgcacttgtgaaacaatatactaaaatgctggaattagatgatgtggatttagagttcactgaagaagctttatcagcaattagtgaaaaagcaattgaaagaaaaacaggtgcgcgtggtttacgttcaatcatagaagaatcgttaatcgatattatgtttgatgtgccttctaacgaaaatgtaacgaaggtagttattacagcacaaacaattaatgaagaaactgaaccagaactatacgacgcagaaggcaatttaattaataatagtaaaacatcagcttaatcattgatgtgttataaaagtgaaaagctccaatcaaagttgacgctcaaatagtttaactttgatcggagcttttttataatgtataccgaaaggttcaaatattatataatggtagagttgaaagagaatataaaaaagtgaggatataaaatgaaagttaatcctaataatattgaattaatcattagtgcagtaaaagaagaacaatatccagaaacagaattgtctgaagttgcactgagcggtcgatctaatgtaggtaagtctacatttatcaatagtatgattggcagaaaaaatatggcacgtacatcacagcaacccggcaaaacgcaaacgttaaatttttataatatagatgaacaacttatttttgtggatgttccagggtatggatatgctaaagtaagtaaaacacaacgtgaaaaatttgggaaaatgattgaggaatatataactaagagagagaatttgcaattagttattcaattagttgatttaagacatgatccaacacaagatgatatcttaatgtacaattatttgaaacattttgatattcctactttagttatatgcactaaagaagacaaaattccaaaaggtaaagttcaaaagcatattaaaaatattaagacacaattagatatggacccagacgatacaattgtaagttattcatcaattcaaaataataaacaacaacaaatatggaatttaattgaaccgtatatttcatagtttttgtacgacaaaacttatacaaaaattttaaaaataatgtaagcacgaaacttttaattagtacacaattgataacatttttcaacgttcatcattttgtcaaaaactcaaaagtaaattagaaagattataatttatttaagcatcgtacttaattggattttaaattatgttataatatttgtattgttagtatatatgggggcgtttcaaatgcattttattgcaattagtataaatcatcgcacagctgatgttgcactaagagagcaagttgcttttagagatgatgccttacgaattgcccatgaagatttatatgaaactaaatctattttagaaaatgtcatattatcaacatgtaatcgaactgaagtatatgctgttgttgatcaaattcacacaggtcgttactatattcaacgatttctagctcgtgcatttggatttgaagtagatgatattaaagcaatgtcagaagtaaaagtgggggacgaagcagtagaacatttattgcgtgtcacttctggtttagattcaatcgtacttggagaaactcaaattttaggtcaaataagagatgcatttttcttagcgcaaagcacaggtacgacaggaacaatttttaatcatctatttaaacaggcaattacttttgcaaaaagagcacataatgaaacagatatagctgataatgctgtaagtgtgtcttatgctgcggtcgagttggcgaaaaaagtatttggcaaattgaaaagtaagcaagctatcattattggtgcaggggaaatgagtgaattatcactattaaatcttcttggttctggaattactgatattacagtagtaaatagaacaattgaaaatgctatgaaattagcagcaaagcatcaagtgaaatatgatgaactatcatcattaccaaatttacttgaaagtgcagatattgtgattagttcaacgagtgcacaatcttatatcattacaaatgaaatgatagaaagaattgcagaaaatagaaagcaagattcactagtattgattgatattgcagttcctcgagatattgaacctggtattagtgccatcacaaacatctttaattatgatgttgatgacttaaaaggtttagttgatgcaaacttacgtgagcgacaattagcggctgcaacaatttcggaacaaattcctgcagaaatacatgcacacaatgagtggattagtatgttgggtgttgttccagtgattagagctttacgtgaaaaagctatggcaattcaagcagaaacgatggacagtattgatcgtaaattgccagggttaagcgaaagagaacgtaaaattatatctaaacatacaaaaagtatcatcaatcaaatgttgaaagatcctattaaacaggccaaagaattaagtagtgataagaaaagtaatgaaaaattagagctatttcaaaatatatttgatatcgaagctgaatgtcctcatgagcaagcgaagcaacaaaaagaaagcaaggtcaaggaaatttcagcgcgacgtatctttagttttgaataagcatattaatatggtgataatatgcaagaaaacctgtttattcgattcaatgaaattatattattaatatacttaatcagtatcatttgctatttttatgattttgtccaaaaaagtcataagattagaagtttaggcatatatttattggggattgtttgggttttacaaacaatctctttatctatttttattatacaaactagacatattccattagggtctatttcagatgtattctatactttaagttggctgattatttcaatctctttaattcttaaccttatcaaagtattgaatttctctgtgtttttcttgaatttaatagggttaacacttttagggatgaatacatttcaaccgacacattatactaataaggttcagaaaattgctgttgtagacgagttactgttagtccatatcggtctagctgtgttaagttatgtcttctttgccttagcttttgtcaatgcattactgtatatcatgcaataccgtaatttgaaggaaaaacgttttgatcaaaaatactttagaataggtagcgttgctacacttgaatcaattgtgttttactcaacgttaagtgggtggataattctcatatttagtattattttaggtacacagtggggtgtaatttcagttggtgaacgtatattcattgacccgaaggtaatactctcttcaattattacagtattatatggaagttatatattgcttagaatcaacaaatggttgaattcaaggtatttaatatactataacattattttattttgcttaaatatgattaatttattttttgcaacacattttgtgaattgagaaaataatctagagcaatccgttcctaggaggaattgaacatgcgtaaattagtcgttggctccagaagaagtaaattagctttaacacaaagccagcaatttattaataaattaaaagctgtcgagccaaatctagaaattgaaattaaagaaattgtcacgaaaggcgatcgtatagtagataaacaattgtctaaagtcggaggcaaaggcttatttgttaaagaaatacaacatgaactttttgaaaaaaatatcgatatggcaatacactcgcttaaagacgtaccaagtgtaattccggaaggtttaacattaggttgtatccctgatagagaattaccttttgatgcgtatatttctaaaacacatacaccactatcccaattgccagaaggcagtattattggtactagttcattacgtcgtggtgcacaaatattatctaagtatcctaatttagagattaaatggattagaggtaatatagatacacgattagaaaagttacaaactgaagattatgatgcgattattttagctgcagctggtttaagaagaatgggctggtcagatgatattgtaacatcttatcttgatagagatacattgttacctgcaatcggacaaggtgctttagggatagaatgtcgtagtgacgatgaagaactattaacattattaagcaaagtacataatgatgaggttgcaaaatgtgtgactgctgaacgaacgtttttagcagaaatggatggtagttgtcaggtgccaatcgcaggatatgctacaatctcagatcaaaaagaaatcgaatttacaggtttaattatgaccccagatggtaaagaacgatttgaatatacaatgaacggaacagatccggttgagttaggcaaaacagtgagtaacaaattaaaagagcaaggtgcttatgaaattataaaacgcttaaatgaacaacattaaataatggagtgacgtttaaatatgaagccagttgtagttatgacacaaacaaatgacatgcaaagtgatttagtatcaattattcacaaaccctttattgatataaagccactaaattttgatattcatttgttaaatcaacgctatgactggcttattttttcatctaaaaatgctgtgaaattcttttataaatatctaaaaggaattaatgttgataacattgctgtgataggaagtaagacagcgcaatattgtgaatcacttggcattcgagttgattttatgccaaacgacttttctcaagaaggatttttaaaatcatttaatcaaactaaccaaaaaatacttttgccttcgagtgaattggcgagaccattgttattagcagcgttatctaaagataatgaagttgttaaaatagatttatatacttcagtgcctaacaaacaaaatatacaagatgttaaagaaatgatagaacatcaacaaatcgatgcattaacattttcaagttcgtcggcagtacgttattattttaatgaaggatttgtaccaaaattcaagtcgtattttgctattggagaacaaacagcacggaccattaaaacatatcaacaaccagtaacaattgcagaaattcaaacactcgaatcactaattgaaaagattttagaaagtaggggctaaaaatgaaatttgatagacatagaagattgagatcatcagcgacaatgagagatatggttagagagaatcatgtaagaaaagaagatttaatatatccaatttttgtagttgaaaaagacgatgtgaaaaaagaaattaagtcattgccaggtgtataccaaatcagtttgaatttacttgaaagtgaattaaaagaagcttatgacttaggcatacgtgccattatgtttttcggtgttccaaactcaaaagatgatataggtactggtgcatacattcacgatggtgttattcaacaggcaacacgtattgctaaaaaaatgtatgatgacttattaattgttgcagacacttgtttatgtgaatatactgatcatggtcattgtggcgtgattgatgaccatacacatgacgttgacaatgataaatcattgccactacttgttaaaacagcaatttctcaagtggaagctggtgctgatattattgcgccaagtaatatgatggatggttttgttgctgaaattcgtcgtggattagatgaagccggctattacaatattcctataatgagttatggtgtcaagtatgcatcaagtttctttggaccttttagagatgcagcagattcagcgccatcatttggggatagaaaaacgtatcagatggaccctgctaaccgtttggaagcacttcgtgaattagaaagtgatcttaaagaagggtgcgacatgatgattgttaaacctgctctaagttatttagacatagttcgagatgttaaaaatcatacgaatgttccagttgttgcatataatgtgagtggagaatatagtatgactaaagcagcggcacaaaatggttggatagatgaagaacgtgtcgttatggaacaaatggtttcaatgaaacgtgcaggtgctgatatgattattacgtattttgcaaaggacatttgtcgctatttagataaataaggttttatatgtatgattttccataaactataggaggaatttactttatgagatatacgaaatcagaagaagcaatgaaggttgctgaaactttaatgcctggtggtgtaaatagtccagtacgcgcatttaaatcagtagatacaccagcaatttttatggatcacggtaaaggctcaaaaatttatgatatcgatggtaacgagtatatcgactatgtactaagttgggggccgcttattttaggacatagagaccctcaagttattagtcatttacatgaagcaattgataaaggtacaagttttggtgcatcaacattacttgaaaataaattggcgcagctcgttattgaccgagtaccttcaatagaaaaagtgcgtatggtgtcatctggtacagaagctacattggatactttaagattagcacgtggttatactggcagaaataaaattgtgaaatttgaaggttgctatcatggtcatagtgattcgttattaatcaaagctggttctggggtggcaacattaggattgccggattctcctggtgtgcctgaaggtattgctaaaaatacaattacagttccatacaatgatttagatgcacttaaaatcgctttcgaaaaatttggagacgatattgctggtgtaatcgtagaacctgttgctggtaatatgggtgtcgtaccaccgattgaaggttttttacagggattaagagatattacgactgaatacggcgcattgctaattttcgatgaagtaatgactggtttcagagtcggttatcattgtgcacaaggttactttggtgtgacaccagatttaacttgcttaggaaaagttatcggtggaggactacctgtaggtgcttttggtggtaaaaaagaaatcatggatcatatagcaccattaggaaatatttatcaagcgggtacgttatcaggaaatcctcttgcaatgacaagtggttatgaaacgttaagccaattaacgccagagacatatgagtattttaatatgttaggcgatatacttgaagacggtttaaagcgtgtatttgctaaacacaatgtaccaataactgtaaatagagcaggttcaatgattggttatttcttaaatgaaggacctgtaactaattttgaacaagcgaataaaagtgatttgaaattatttgcagaaatgtatcgagaaatggcaaaagaaggtgtgtttttaccaccatctcaatttgaaggtacattcttatctacggcacacacgaaagaagatattgaaaaaacgattcaagcatttgatacggctttaagtcgtattgtaaaataa

SEQ ID NO: 100 - DNA, 5178 bp, Staphylococcus aureus
atgtctaaatttgatgaacaaatcattgtagtacctagagaaattatttttaataatgaaaagaatactttcaatgggtttttaaataagaataaaccagaaggtcaaaatatttttgatgcgctaagtcaatatgaagttaagcgacgcggcgatatggaagaggatccatcatataaacaactcatttcttattgtttacttgaaaatgagcatggcgagatattagtgtatgaacgattatctggcggtggagaagctcgattgcatggacaatcttcaataggtgtaggcggtcatatgaatgatgttccaggagcagaatctattaacgaagtattgagagttaatgcacagagagaattagaagaagaagtaggtttaagtgagcaagattcacaaaatatggaatatatcggttttattaatgacgataataatgaagtgggcaaggtacatattggtgttgtatttaaaatcactgtaagtacgaatgatgtagaagctaaagaaacagatactttacgaataaaatgggttgaaaaaggcaacatagagtcatatgatgatttcgaaacgtggagcgcattaatccttcaagatttataatcaaacgaggtgacatatatgtcagatattattcagtttcctaactcttcgaaaaagttatataaagatataaaacgtgctgaacaagaccaaaactatgacctgatgtatgaatatattgtgcaatatgaacgtcaatttgaactcactgaagaaatagcaatgatgaaatgccgtatgttatatgagacggggtcatttcttgaattaagagaagaaacaattgtcttattgaaaactggcatacaacaatatgatgcattgatgatttattacgtgaaaagtttgattggtttgggacaatattttgaagcggtagaagtaattcatcaaattattgatgaagtcaaagatcacaaaacaagaatggcattacatcctcttaaagaatttgctaagtcaaaattaattgaagatgaaaaacgattgactcagtcattaactgattttgatacgttatcaatgagggaacagacgcacttgattttgaagttaatagacaatggtcattttcaatttcaagaaacggtattatatatattaaaatctaatacgtacagttataacctcattagtttaatgattgagtatttaaggtttgcaaattgtacacaagaactgacaattgaaaagtatggtatggatgtaacttttgtaccagctaatttaaatgggctagaacatacaacactgaaagaaaaagttatacctaacgttatggaaacattaaatgatggtgcattacatatcgctgaagaagcacaccatattatgaataatcactctatcatgatttatccaattgatattgaaactttgtttgaaacgaataaatggattaatgcatacgaatgttatttcaaaaatatgttaggacttaaatgtgaattacaaagtatcgatgcatttaattttattcagcaattagatttgaataataatagttaaattgttgcaaaataatactcagcattttaatatagttttgacgaaaaaagttgatttacaaatatataaacgttgtgatttcaatgtttgtatagggaatagacctatgatataatagggaagttgaaaaaataaattagttaatcatggaggtatatatacatgacagcaacttgggaaaaaaaggaaggtaacgaaggtttattaactgttactgttcctgcagaaaaagtaaacaaagcgttagatcaagcattcaaaaaagtggttaaacaaattaacgtacctggattccgtaaaggtaaagtgccacgtccaatttttgaacaacgctttggtgtagaagcattatatcaagatgctatcgacattttattaccagatgcttatggtgaagcaattgacgaaactgatattaaaccagttgcacaaccagaagtaagtgttactcaaattgaaaaaggtaaagatttcatttttgaagcaacagttacagttgagccagaagttaaattaggagactataaaggtcttgaaattgaaaaacaagaaactgaattatctgatgatgagttacaagaagcgattgaccacagcttaggacatttagctgaaatggtagttaaagaagatggtgttgttgaaaatggcgacacagttaacattgactttagtggttcagttgacggagaagaattcgaaggtggacaagctgaaggttacgatttagaaatcggttcaggttcattcatacctggtttcgaagagcaattagaaggtatgaaagttgacgaagaaaaagatgttgtcgtaacattcccagaagaataccatgctgaagaattagctggtaaagaagcaactttcaaaacaaaagttaacgaaattaaatttaaagaagttccagaattaacagatgaaattgctaatgaattagatgcagaagcaaatacagtagacgagtacaaagaaaacttacgtaaacgtttagctgaacaaaaagctacagatgctgaaaatgttgaaaaagaagaagcgattacaaaagctactgataatacaacaatcgatattcctgaagcaatggttaatactgaattagatcgtatggtgtctgaatttgcacaaagaattcaacaacaaggtttagatttacaaacgtacttccaaatctcaggtcaagatgaaactcaattaagagagcaaatgaaagacgatgcagaacaacgtgttaaaactaacttaactttaactgcgatcgctgaagctgaaaaaatcgaagctactgatgaagatatcgataaagaattagaaaaaatgagtaaacaatttaatatctcagttgaagatatcaaaaatactttaggtaatactgatatcattaaaaatgatgttcgtatccaaaaagttatcgatttattaagagataacgcaaagttcgttgaaggaactaaagaagattaatcttcattaaatattaaattacaaaaatgagtagcagatgcatagcttatgtatctgctactattctttaagcaaaaagtttgtatgttaatatgttgcattgtaatatccaatctagtatagtctttaacgaataggggtgtaaaaagaatgtttaaattcaatgaagatgaagaaaatttgaaatgctctttctgcggaaaagaccaagatcaagtaaaaaaacttgtagcaggaagtggtgtatatatttgtaatgagtgtattgaattatgctcagaaatcgtcgaagaagaattagctcaaaacacttctgaagcgatgacagaattacctactcctaaagaaattatggatcatttaaacgaatatgttattggtcaagaaaaagctaaaaaatctttagctgtagctgtttataaccactataagcgtattcaacaattaggaccaaaagaagatgatgttgaattacaaaaaagtaacattgcattaattgggccaacaggtagtggtaaaacattattagctcaaacattagccaagacgttgaatgtaccatttgcaattgcagatgcgacaagtttaactgaagctggttatgtaggcgatgatgttgaaaatatcttgttgagattaattcaagcagctgactttgacattgataaagccgaaaaaggtattatttatgtagatgaaattgataaaattgcacgtaaatctgaaaacacatctataacacgtgacgtttcaggtgaaggtgttcaacaagcattgcttaaaatcttagaaggtacgactgcaagtgttccgccacaaggtggacgcaaacatccaaaccaagaaatgattcaaattgatacaacaaatatcttatttattcttggtggtgcctttgatggtattgaagaagtgattaagcgccgtcttggtgaaaaagttattggtttctcaagcaatgaagctgataaatatgacgaacaagcattattagcacaaattcgcccagaagatttgcaagcctatggtttgattcctgaatttatcggacgtgtgccaattgtagctaatttagaaacattagatgtaactgcgttgaaaaacatcttaacgcaacctaaaaatgcacttgtgaaacaatatactaaaatgctggaattagatgatgtggatttagagttcactgaagaagctttatcagcaattagtgaaaaagcaattgaaagaaaaacaggtgcgcgtggtttacgttcaatcatagaagaatcgttaatcgatattatgtttgatgtgccttctaacgaaaatgtaacgaaggtagttattacagcacaaacaattaatgaagaaactgaaccagaactatacgacgcagaaggcaatttaattaataatagtaaaacatcagcttaatcattgatgtgttataaaagtgaaaagctccaatcaaagttgacgctcaaatagtttaactttgatcggagcttttttataatgtataccgaaaggttcaaatattatataatggtagagttgaaagagaatataaaaaagtgaggatataaaatgaaagttaatcctaataatattgaattaatcattagtgcagtaaaagaagaacaatatccagaaacagaattgtctgaagttgcactgagcggtcgatctaatgtaggtaagtctacatttatcaatagtatgattggcagaaaaaatatggcacgtacatcacagcaacccggcaaaacgcaaacgttaaatttttataatatagatgaacaacttatttttgtggatgttccagggtatggatatgctaaagtaagtaaaacacaacgtgaaaaatttgggaaaatgattgaggaatatataactaagagagagaatttgcaattagttattcaattagttgatttaagacatgatccaacacaagatgatatcttaatgtacaattatttgaaacattttgatattcctactttagttatatgcactaaagaagacaaaattccaaaaggtaaagttcaaaagcatattaaaaatattaagacacaattagatatggacccagacgatacaattgtaagttattcatcaattcaaaataataaacaacaacaaatatggaatttaattgaaccgtatatttcatag

SEQ ID NO: 101 - DNA, 1151 bp, Staphylococcus aureus
atagcaaaagatcaaactcaaatcaatgacaaaattcgtgcaaaagaattacgtttaatcggtcaagatggtgaacaaattggtgttaaatcaaagcgtgaagctttagaaatggctgaacgtgtagatttagacttagtggtcgttgcaccgaatgcgaaaccaccagttgcaagaattatggattacggtaaattcaaattcgaacaacagaaaaaagaaaaagaaatgaaaaagaaacaaaaaattatcaatgttaaagaaattcgtttaagtccaacaattgaggaacatgatttccaaactaagttgaaaaacggacgtaaattcttaactaaaggcgataaatgtaaagtatctattcgtttcagagggcgtgccattacgcataaggaaattggtcaacgtgtgctagaaaaatatgcagatgaatgcaaagatatagcaacagttgaacaaaaacctaaaatggacgggcgtcaaatgtttatcatgttagcgccaacagctgaaaaataattaaagctattacaggaggacttatattatgccaaaaatgaaaactcaccgcggagcagctaaacgtgttaaaagaactgcttcaggtcaattaaaacgttcaagagctttcacatctcacttattcgcaaacaagagcactaaacaaaaacgtcaattacgtaaagctagattagtgtctaagagcgatatgaaacgtgtaaaacaattattagcatacaaaaaataagaacaaatacagaaatcggtaggaattacctaaggaggaattttttatgccacgagttaaaggtggaacagtaacaagagcgcgtcgtaaaaaaacgattaaattagctaaaggttacttcggttcaaaacatacattatacaaagtagctaagcaacaagtaatgaaatcaggtcaatatgctttccgtgaccgtcgtcaacgtaaacgtgacttccgtaaattatggattacacgtatcaacgcagcagctcgtcaacatgaaatgagctactcacgtttaatgaacggtttgaaaaaagctggtatcgacattaaccgtaaaatgttatcagaaatcgcaatttctgacgaaaaagcatttgctcaattagtaactaaagctaaagatgctttaaaataa

SEQ ID NO: 102 - DNA, 2792 bp, Staphylococcus aureus
atgaaatgcccgaaatgtaattctacacaatctaaagttgtagattcaaggcatgccgatgaattaaatgccattcgaagacgaagagaatgtgaaaattgtggaacacgtttcactacatttgaacatatcgaagttagtcagcttatagttgtgaaaaaagatggcacaagagagcagttttcaagagaaaaaatacttaatggacttgtgcgttcttgtgagaaacgaccagttagatatcaacaacttgaagacataacaaacaaggttgaatggcaattacgagatgaaggtcatacggaagtgtcttcacgagatataggtgaacacgttatgaacttgttaatgcatgttgatcaagtttcatatgttagatttgcatcagtctataaagaatttaaagatgttgatcaattgttagcatcgatgcaagggattttaagcgaaaacaaacggagtgatgcttaaatgggacgacaagccttcgaattcggcttaagaccaaaggatcaattcaaagttatgcaacactttgatttaaatacgaatcatttagaggtattgaatcgactgtatacaccgctaattggaacgcaagcagtgggtttatatcattttatgactcaattcgttaaagacagtcataatgaaacattgattctttctcattatatttttatgaatgaacttaaaattaatttactagagtttagacaacaaatggacttacttgaagcgattggattgttaaaggcgtttgtcaaacatgatgaacaagaaacacaatttgtttaccaattaattcaaccgccttcagcacatttattttttaatgatccaatgttgtcaatctttttatatagtgaagtcgagcatcgtcgatttcatgagttgaagaaatactttgagtatcaacaaattgatttgagtgaatttaaacaggtaacaagacaatttactgatgtttttaaagtgccgtctacaaaaatagatatcgatacaagtgatattccgattaatgaaccgtaccaaggtatcgatttatcaaatgaatcttttgactttgaaatgttgagacaaatgttaggtaaacattttattagtcaagacattgttaccaaagatgcaaagcgtttaattacacaactcgcgactttatatggtttaacagcagatggcatgaagcatgttattttaaattcaattacaagtggacaacagttatcctttgaagaaatgcgtaaacaagcacgctcgtattatttaatggaacacgaaaatcaaatgcctaaattacaggtgaaatctcctgctacatcatcttcgacgggcaaatcttcagaagtgaatccaaagccacaaagtgatgaatggtttgagttacttgaacaaacgagtccaattgatatgttagcttcttggtctgaatcagaaccaactatatcgcaaaagacaatggttgaagaattaattgaacgtgaaaaaatgtcttttggcgtcattaatattttgttgcaatttgtcatgttaaaagaagatatgaaacttcctaaagcgtatattttggaaatagcatcaaattggaagaaaaaaggtattaagacagctaaagaagcatataattacgctaaaaaagttaatcaacctaaaaatgagggttctagcggaaattaccaaaagcgtggttcatactatgggcaacgtaatcgtatttcaaaagaaaaaacacctaaatggttagaaaatagagataaacctagtgaagaagattcggctaaagataatagcgtagatgatcaacaattagagcaagatcgacaagcatttctagataaattatctaaaaaatgggaggaggacagtcgataatgaagcaatttaaaagtataattaacacgtcgcaggactttgaaaaaagaatagaaaagataaaaaaagaagtaatcaatgacccagatgttaagcaatttttggaagcgcatcgagctgaattaacgaatgctatgattgatgaagacttaaatgtgttacaagagtataaagatcaacaaaaacattatgacggtcataaatttgctgattgtccaaatttcgtaaaggggcatgtgcctgagttatatgttgataataaccgaattaaaatacgctatttacaatgcccatgtaaaatcaagtacgacgaagaacgctttgaagctgagctaattacatctcatcatatgcaacgagatactttaaatgccaaattgaaagatatttatatgaatcatcgagaccgtcttgatgtagctatggcagcagatgatatttgtacagcaataactaatggggaacaagtgaaaggcctttacctttatggtccatttgggacaggtaaatcttttattctaggtgcaattgcgaatcagctcaaatctaagaaggtacgttcgacaattatttatttaccggaatttattagaacattaaaaggtggctttaaagatggttcttttgaaaagaaattacatcgcgtaagagaagcaaacattttaatgcttgatgatattggggctgaagaagtgactccatgggtgagagatgaggtaattggacctttgctacactatcgaatggttcatgaattaccaacattctttagttctaattttgactatagtgaattggaacatcatttagcgatgactcgtgatggtgaagagaagactaaagcagcacgtattattgaacgtgtcaaatctttgtcaacaccatactttttatcaggagaaaatttcagaaacaattga

SEQ ID NO: 103 - DNA, 5353 bp, Staphylococcus aureus
gtgaataaattagtattaatcgatggtaatagcttaagttttagagctttttatgcattacctttgttatcaaacaaagcaggcattcataccaatgcagtatatggttttgcaatgttactagagaagattttaaaagaagaaaagccaaatcattttttagtagcgtttgatgcaggtaaaacaactttcagacatgaaaaatatagtgaatataaaggtggacgccagaaaacgccgcctgaactaagtgagcaatttccttatatacgccaattattagatgcttatcatattaaacgttatgaattagataactatgaggcagatgatattatcggaactttaagtaaagaagcagataaagcgggctttcagacaattattataacgggagaccgagatttaacacaacttgcaacggataatgtaaccatttattacactaaaaaaggtgttactgatgttgatcattatacacctgactttattgcggaaaaatacaacgggttaacacctaatcaaattattgatatgaaaggattaatgggagatacttctgataatataccaggtgttgcaggtgttggagagaaaacagcaataaaattgctaaaccaatttgacacagtagaaggtgtctatgaacatttagatgaaatttcaggtaaaaagttaaaagaaaaacttcaaaatagcaaagaagatgcattaatgagtaaagaattagcaacgattaatgtagatagtccgattgaagtaaaacttgaagatacgttaatgactcatcaagatgaacaacaagaaaaaatcgaattgtttaagaagttagaattcaaacaattgttgtctgacattgatcaatcagcaagcgttgaagatgcaatagaaaagacatttgaaattgaaacgtcttttgataatattgattttacttcattgaaagaagcggccatccatttcgaattagacggtggtaactatttgcgaaataatattttaaaattctctttatttacaggtgagaaacatattgtaattaatgcggatgacataaataattatgccgaactagtttcatggttagaaaatccgaatacgaaaaaagtcgtatatgatgctaaaaaaacatatgtagcatcacatagattgggaattgatattcaaaatatttctttcgatattatgttggccagttatataattgatccatctcgtacgattagtgatgttcaatcagttgtttcattgtacggtcaaagttttgtgaaagacgatgtaagtatatatggaaaaggtaagaaatttaaggtacctgaagatgatgttttaaatccatatgttgcttctattactgatgcaatttactttgcgaaaccaaatatggataaacaattagaagaatacaatcaggtagaactcttagctgatttagagctaccgctagctaagattttaagtgaaatggaagaaattggtatatttacagatgttcatgatttagaagaaatggaaaaagaaattcaagaaaaattagacgtcttgattcgaaatatccatgatgcagctggtgaagattttaatataaattctcctaaacaattaggtgttgtattgtttgagacattacaattacctgttattaaaaagacgaaaacaggatattctactgctgtagatgtcttagagcaattgcaaggtgaacatcctatcattgattatattttagaatatcgtcaattatctaagttacagtctacttatgttgaaggattgcaaaaggtaattagtgatgatcaacgtatccatacacgttttaaccaaactttagcgcaaactggacgtttatcaagtgtagatcctaatttacaaaatattccggttagacttgaagaagggcgtaaaataagaaaagcctttaaaccaacttcaaaagatagcgttatattatcagcagattattctcaaattgaattgcgtgtattagcacacattacacaagatgagagtatgaaagaagcatttatcaacggcgatgatattcatacagcaactgctatgaaagtatttggtgtagaggctgatcaagtcgatagtttaatgcgtcgtcaagcaaaagcggttaactttggaattgtttatgggataagtgattatggtttaagtcaaagtttaggtattactcgtaaaaaagcaaaagcattcattgatgattatttagctagtttcccaggtgtgaaacaatatatgtctgatattgtaaaagatgccaaagctttaggttacgtggaaacattgctacatcgtcgacgctatattcctgatattacgagtcgtaactttaatttacgcggctttgctgaacgtactgctatgaatacgccaatacaaggcagtgctgcagatatcattaaactggcaatggttaaatttgcacaaaaaatgaaagagacaacatatcaagctaaactattattacaagtacacgatgaattaatttttgaagtacctaagtcagaagtagattcatttagtgaatttgtagaagagataatggaaaatgcattgcaattagatgttccattaaaagtagactcaagttatggtgcaacttggtatgatgcaaaataaagtgaggttaatggtatgcccgaattaccagaagtagaacatgtaaaaagaggaattgaaccctacgttataaatcaaaaaattgaacacgttatattttcggataaagtaatcgaaggtaaagctcaaggcaaggaaacaattataaaaggaattgaattagatacttttaaaactttatcggaaggctataccattacaaatgtagaacgaagaagtaaatatatcgtttttcagctagataataaacgagaacaacgtacattaattagtcatttaggtatggcgggtggttttttcattgtagatgaacttgaagatattatgatacctaattatcgtaagcattggcatgttatttttgagttgtcaaatgacaaaaagttaatttattcagatatacgtcgttttggagaaattagaaatgttgcgtctgtagcatcttatccttcatttttagaaatagcgcctgaaccttttacaaatgaagcattgacgtattatttaaatcgaattcatcaacagtctaataagaataaaccaatcaaacaagtgattttggatcataaagtaatcgcaggttgcggaaatatttacgcatgtgaagcgttgtttcgtgcaggtgttttaccagataaaaaagtaaaagacttaacacaccaacaacaagaaatggttttttattatgttagagaagtactagaagaaggtattaagcatggcggtacaagtatttcagattatcgtcatgctgatggaaaaactggtgagatgcaattgcatcttaatgtatataagcagccggtatgcaaagtgtgtggaagtcaaattgaaacaaaaatcatcgcgacaagaaatagtcattattgtccagtatgtcaaaaataaagaaagagtgaaattatgccgaaagttattggtctaacaggtggaatcgcctcaggaaaatcaacagtatcagaactcttatccgtattcggttttaaagtagtagatgctgataaagcagccagggaagctgttaaaaaggggagtaaaggtttagctcaagtacgagaagtctttggtgatgaagcaattgatgaaaatggtgagatgaatcgtcgttatatgggtgatttagtgtttaaccatccagaaaaacgcttagaattaaatgctatcatacatcctatcgtgcgagatattatggaagaagaaaagcaagaatatttaaaacaaggatataatgtaatcatggatattccattattatttgaaaatgaattggaaaatacagtagacgaagtgtgggttgtatacacttctgaaagtatacaaatggatcgtttaatgcaacgtaataatctgtcattagaagatgcgaaagcacgtgtctatagccaaatttctattgataaaaaaagccgaatggccgatcatgttatcgataatttaggggataaacttgaattaaaacaaaaccttgagagattgttagaagaagaaggttatattgaaaagccgaattacggagaagaagattaatattacactataaataagtcattactttacgtacgcgttgatgtatgtaagtaatgactattttttataaaaaagataaatatatcaacggaaaacgctttcaaaattcatataatatgctatactaattccataaagtataacatataaaaatcaaggggtgcttttaatgtcaacgaatattgcaattaatggtatgggtagaattggaagaatggtattacgtattgcattacaaaataaaaatttaaatgtagtagcgataaatgctagttatccacccgaaacaattgcacatttaatcaattacgatacaacacatggaaaatataatctaaaagttgaaccgattgaaaatggattgcaagttggtgatcataaaattaaattggttgctgatcgcaatcctgaaaacttgccatggaaagaattagatatcgatattgctatagatgcaactggtaaatttaatcatggtgataaagccatcgcacatattaaagcaggtgccaaaaaagtattgttaactggtccttcaaaaggtggacatgttcaaatggtagttaaaggcgtaaatgataaccaattagatatagaagcatttgacatttttagtaatgcttcatgtactactaattgcattggtccagttgcaaaagttttaaataatcagtttggaatagttaatggtttaatgactactgttcacgctattacaaatgaccaaaaaaatattgataatccacataaagatttaagacgtgcacgttcatgtaatgaaagcattattcctacttctactggtgcggcgaaagctttaaaagaagtattaccagaattagaaggtaaattacacggcatggcattacgtgtaccaacaaagaatgtatcgctcgttgatttagttgttgatttagaaaaagaagtaactgcagaagaagtaaaccaagcttttgaaaatgcaggtttagaaggtatcatagaagtcgaacatcaaccactagtgtctgttgattttaatactaatccaaattcagctattattgatgcaaaatcaacaatggtcatgtcagggaataaagtaaaagttattgcttggtatgataatgaatggggttattcaaatagagttgtagatgttgctgagcaaattggagcacttttgacatcaaaagaaactgtaagtgcaagttaa

SEQ ID NO: 104 - DNA, 2703 bp, Staphylococcus aureus
atgaatgctgccgtaagagcagttgttcgtacagcaatttacaatgaaattgaagtttatggtgtgtatcatggttaccaaggattgttaaatgatgatattcataaacttgaattaggatcagttggggatacgattcagcgtggaggtacattcttgtattcagcaagatgtccagagtttaaggagcaagaagtacgtaaagttgcaatcgaaaacttacgtaaaagagggattgagggccttgtagttattggtggtgacggtagttatcgcggtgcacaacgcatcagtgaggaatgcaaagaaattcaaactatcggtattcctggtacgattgacaatgatatcaatggtactgattttacaattggatttgacacagctttaaatacgattattggcttagtcgacaaaattagagatactgcgtcaagtcacgcacgaacatttatcattgaagcaatgggccgtgattgtggagatctagcattatgggctggattatcagttggtgctgagacaattgtagttccagaagtgaaaacagatattaaagaaatagctgataaaattgaacaaggtattaaacgtggtaagaaacactcaatcgttcttgtagcagaaggttgcatgactgcgcaagattgtcaaaaagaattatcacaatacatcaatgttgataatagagtgtctgtgttaggtcacgttcaacgtggtggtagcccaacaggtgcggatagagttttagcatcacgtttaggtggatatgcggtagacttattaatgcaaggtgaaacagctaagggtgttggaattaagaacaataaaattgtagcaacatcttttgatgaaatttttgatggtaaagatcataaatttgattatagtctatatgaacttgctaacaagttatctatataagatttcaggaggaattataaaatgagaaaaactaaaattgtatgtacaattggaccagcttcagaatcagaagaaatgattgagaaattaatcaatgctggtatgaacgttgcacgattaaacttttcacatggtagtcatgaagagcataaaggtagaattgatacaattcgtaaagtagctaaaagattagacaaaattgtagcaattttattagatacgaaaggtccagaaattcgtacgcataatatgaaagacggtatcattgaacttgaacgtggtaacgaagttattgttagcatgaatgaagttgaaggaacacctgaaaagttctcagtaacatatgaaaacttaattaacgatgttcaagtaggttcatacattttacttgatgatggcttaattgaattacaagttaaagatattgaccatgctaaaaaagaagttaaatgtgatattttaaactctggtgagcttaaaaacaaaaaaggtgttaacttacctggtgtaagagtaagtttacctggtattacagaaaaagatgctgaagatatccgtttcggtattaaagaaaatgttgacttcattgcagcaagtttcgtacgtcgtcctagtgatgttttagaaattcgtgaaattttagaagaacaaaaagctaacatttcagtattccctaaaattgaaaaccaagaaggtattgataatattgcggaaattcttgaagtgtctgatggtttaatggttgcacgtggtgacatgggtgttgaaattccacctgaaaaagtaccaatggttcaaaaagatttaatcagacaatgtaacaaattaggtaaaccagttattacagctacacaaatgttagattctatgcaacgtaacccacgtgctacacgtgcagaagctagtgacgttgccaacgcaatctatgatggtacagatgcagtaatgttatctggtgaaactgctgctggtttatatcctgaagaagctgttaaaacaatgagaaatattgctgtatcagctgaagcagcccaagattataaaaagttattgtcagatcgtactaaattagttgaaacttcattagtgaatgctatcggtatttcggttgcacatacagctttaaacttaaatgttaaagcaattgtagctgctactgaaagtggttcaacggcacgtactatctctaaatatcgtccacattcagacattattgcggtgactccaagtgaagaaacagcacgtcaatgttcaattgtttggggagttcaacctgtagttaaaaaagggcgtaagagtacagatgcattgttaaacaatgcagttgcaacagctgttgaaactggtagagtatctaatggtgatttaatcattattactgctggtgtaccaactggtgaaactggaactactaatatgatgaaaatccacctagttggtgacgaaattgctaatggtcaaggtattggacgtggatcagttgttggtactacgttagttgctgaaactgttaaagatttagaaggtaaagatttatctgacaaagttatcgttactaactcaatcgatgaaacgtttgtaccttatgtagaaaaagctttaggattaattacagaagaaaatggtattacatcaccaagtgcaattgttggtttagaaaaaggtattccaacagttgtaggtgtagaaaaagctgttaaaaacataagcaataacatgttagttacgattgatgctgctcaaggtaaaatctttgaaggatatgcaaacgtactataa

SEQ ID NO: 105 - DNA, 1802 bp, Staphylococcus aureus
atgtttaaagatttttttaatcgaacaaagaaaaagaaatatcttacagtacaagactctaaaaataatgatgtgcctgcaggtattatgactaagtgtccaaagtgtaagaaaattatgtacacaaaagaattagctgaaaatttaaatgtgtgctttaattgtgatcatcatattgctttaactgcgtataaacgtatagaagcaatttctgatgaaggatcatttacagaattcgataagggaatgacctctgcgaatccattagattttccaagttatttagaaaaaattgaaaaggaccaacaaaagacaggtcttaaagaagcagttgtgactggtacagcgcaactagatggtatgaaatttggcgttgctgtcatggattcacgttttagaatgggaagtatgggatcggttatcggtgaaaagatatgtcgcatcattgattactgcactgagaaccgtttaccatttattcttttctctgcaagtggtggtgcacgtatgcaagaaggtattatttccttgatgcaaatgggtaaaaccagtgtatctttaaaacgtcattctgacgctggactattatatatatcatatttaacacatccaactactggtggtgtatctgcaagttttgcatcagttggtgatataaatttaagtgagccaaaagcgttgataggttttgcaggtcgtcgagttattgaacagacaataaacgaaaaattgccagatgatttccaaactgcagaatttttattagagcatggacaattggataaagttgtacatcgtaatgatatgcgtcaaacattgtctgaaattctaaaaatccatcaagaggtgactaaataatgttagattttgaaaaaccactttttgaaattcgaaataaaattgaatctttaaaagaatctcaagataaaaatgatgtggatttacaagaagaaattgacatgcttgaagcgtcattggaacgagaaactaaaaaaatatatacaaatctaaaaccatgggatcgtgtgcaaattgcgcgtttgcaagaaagacctacgaccctagattatattccatatatctttgattcgtttatggaactacatggtgatcgtaattttagagatgatccagcaatgattggtggtattggctttttaaatggtcgtgctgttacagttattggacaacaacgtggaaaagatacaaaagataatatttatcgaaattttggtatggcgcatccagaaggttatcgaaaagcattacgtttaatgaaacaagctgaaaaattcaatcgtcctatctttacatttatagatacaaaaggtgcatatcctggtaaagctgctgaagaacgtggacaaagtgaatctatcgcaacaaatttgattgagatggcttcattaaaagtaccagttattgcgatagtcattggtgaaggtggcagtggaggtgctctaggtattggtattgccaataaagtattgatgttagagaatagtacttactctgttatatctcctgaaggtgcagcggcattattatggaaagacagtaatttggctaaaattgcagctgaaacaatgaaaattactgcccatgatattaagcaattaggtattatagatgatgtcatttctgaaccacttggcggtgcacataaagatgttgaacagcaagctttagctattaaatcagcgtttgttgcacagttagattcacttgagtcattatcacgtgatgaaattgctaatgatcgctttgaaaaattcagaaatatcggttcttatatagaataa

SEQ ID NO: 106 - DNA, 16569 bp, Staphylococcus aureus
atggaaagtacattagaattaacaaaaattaaagaagtattacaaaaaaacttgaagattttaattattttaccgctattatttttaattattagcgctattgttacatttttcgtcttatcacctaaatatcaagctaatactcaaatcttagtgaatcaaactaagggtgacaatcctcagtttatggcacaagaggttcaaagtaatattcaacttgtaaatacgtataaagaaattgttaaaagtcctagaattttagatgaggtgtcaaaggacttaaatgataagtattcaccatctaaattgtcgagtatgttgacaattacaaaccaagaaaatacgcaacttatcaacatccaagttaaaagtggtcataaacaagattcggaaaaaattgcgaatagcttcgctaaagttacaagtaaacaaattccgaagattatgagtgtggataacgtatcaattttatctaaagcagacggtacagcagttaaagtcgcaccaaaaactgtagtgaatctaatcggtgcattctttttaggattagttgtcgcgcttatatatatcttcttcaaagtaattttcgataagcgaattaaagatgaagaagatgtagagaaagaattaggattgcctgtattgggttcaattcaaaaatttaattaaggatggttgctacttatgtcaaaaaaggaaaatacgacaacaacactatttgtatatgaaaaaccaaaatcaacaattagtgaaaagtttcgaggtatacgttcaaacatcatgttttcaaaagcaaatggtgaagtaaagcgcttattggttacttctgaaaagcctggtgcaggtaaaagtacagttgtatcgaatgtagcgattacttatgcacaagcaggctataagacattagttattgatggcgatatgcgtaagccaacacaaaactatatttttaatgagcaaaataataatggactatcaagcttaatcattggtcgaacgactatgtcagaagcaattacgtcgacagaaattgaaaatttagatttgctaacagctggccctgtacctccaaatccatctgagttaattgggtctgaaaggttcaaagaattagttgatctgtttaataaacgttacgacattattattgtcgatacaccgccagttaatactgtgactgatgcacaactatatgcgcgtgctattaaagatagtctgttagtaattgatagtgaaaaaaatgataaaaatgaagttaaaaaagcaaaagcacttatggaaaaagcaggcagtaacattctaggtgtcattttgaacaagacaaaggtcgataaatcttctagttattatcactattatggagatgaataagtatgattgatattcataaccatatattgcctaatatcgatgacggtccgacaaatgaaacagagatgatggatcttttaaaacaagcgacaacacaaggtgttacagaaatcattgtaacatcacatcacttacatcctcgatataccacacctatagaaaaagtgaaatcatgtttaaaccatattgaaagcttagaggaagtacaagcactaaatctaaagttttattatggtcaggaaataagaattaccgatcaaatccttaatgatattgatcgaaaagttattaccggtattaatgattcacgctatttactaatagaatttccatcaaatgaagttccacactatactgatcaattatttttcgaattacagagtaaaggctttgtaccgattattgcacatccagagcgaaataaagcaataagtcaaaaccttgacatactatacgatttaattaacaaaggtgctttaagtcaagtgacaacggcgtcattagcgggtatttccggtaaaaaaattagaaaattagcaattcaaatgattgaaaacaatctgacacatttcatcggttcagatgcgcataacacagaaatcagaccgttcttaatgaaagacttatttaatgataagaaattacgtgattattatgaagatatgaacggatttattagtaatgcgaagttagttgttgatgataaaaaaattcctaaacgaatgccacaacaagattataaacagaaaagatggtttgggttataaacagcaaatgaggggttttatggcacatttatctgtgaaattgcggcttttaatactagcattaatcgattcactgatagtgacattttcagtattcgtaagttattacattttagaaccgtatttcaaaacatattctgtcaaattattaatattggcagctatatcactattcatatcgcatcatatttcagcatttatttttaatatgtatcatcgagcgtgggaatatgccagtgtgagtgaattgattttaattgttaaagctgtgacgacatctatcgttattacgatggtggtcgtgacaattgttacaggcaatagaccgttttttagattgtatttaattacttggatgatgcacttgattttaataggtggctcaaggttattttggcgtatttatcggaaataccttggaggtaagtcatttaataagaagccaactttagttgttggtgctggtcaagcaggttcaatgctgattagacaaatgttgaaaagtgacgaaatgaaacttgaaccggtattagcagtcgatgatgacgaacataaacgcaatatcacaattactgagggtgtaaaagtccaaggtaaaattgcggatattccagaactagtgaggaaatataagattaaaaaaatcatcattgcaattccaactattggtcaagagcgtttgaaagaaattaataatatttgccatatggatggcgttgagttattgaaaatgccaaatatagaagacgtcatgtctggtgagttagaagtgaatcaactgaaaaaagttgaagtagaagatttactaggcagagatcctgttgaattagatatggatatgatatcaaatgaattgacgaataaaactattttagttacgggtgcaggtggttcaataggatcagaaatttgtagacaagtttgtaatttctatccagaacgtattattctacttggccatggtgaaaacagtatttatttaatcaatcgtgaattgcgaaatcgcttcggaaaaaatgttgatatcgttcctattatagcggatgtgcaaaatagagcgcgtatgtttgaaattatggaaacgtataaaccatacgcagtttatcatgcagcagcacacaagcacgtgccgttaatggaagacaaccctgaagaagcagtacataataatattttaggtacgaaaaatactgctgaagctgctaaaaatgcagaggtaaagaaattcgttatgatttctacggataaagccgttaatccgcctaatgtcatgggagcttcaaagcgaattgcagaaatgattattcaaagtttaaatgatgaaacgcatcgaacaaattttgttgcagtgagatttggtaatgtacttggatcgagaggatctgtgattccacttttcaaaagtcaaattgaagaaggtgggccagttactgtgacacatcctgaaatgacacgttactttatgacaattcctgaagcttctagactagttttgcaggcaggggcattagcagaaggtggcgaagtatttgtgctagatatgggagaaccagtgaaaattgtagatttggcacgtaatttaattaagctaagtggtaaaaaagaagacgacatacgcattacttatacagggattagacccggcgaaaaaatgtttgaagagcttatgaataaagatgaggttcatcctgaacaagtatttgaaaaaatttatcgtggcaaagtacaacatatgaaatgtaatgaagttgaagcgattattcaagacatcgtcaatgactttagtaaagaaaaaattattaactatgccaatggcaaaaagggagataattatgttcgatgacaaaattttattaattactgggggcacaggatcattcggtaatgctgttatgaaacggtttttagattctaatattaaagaaattcgtattttttcacgcgatgagaaaaaacaagatgacattcgaaaaaaatataataattcaaaattaaagttctacattggtgatgtgcgtgatagtcaaagtgtagaaacagcaatgcgagatgttgattacgtattccatgcagcagctttaaaacaagtgccgtcatgtgaattctttccagttgaggcagtgaagacaaatattattggtacagaaaatgtcttacaaagtgctattcatcaaaatgttaaaaaagtcatatgtttatctacagataaggcagcgtatcctattaatgctatgggtatttcaaaagcaatgatggaaaaagtattcgtagccaaatcaagaaatattcgtagtgaacaaacgcttatttgtggtacaagatacggtaatgtgatggcttcaagaggatcagtaatacctttgtttatcgacaaaatcaaagctggagaacctttaacgattacagatcctgatatgacaagatttttaatgagcttagaagatgcggtagaactagttgttcatgcatttaagcatgcagagacaggagatattatggttcaaaaagcaccaagctcaacggtaggggatcttgcgaccgcattattagaattgtttgaagctgataatgcaattgaaatcattggtacgcgacatggagagaaaaaagcagaaacattgttgacgagagaagaatacgcacaatgtgaagatatgggtgattattttagagtgccggcagactccagagatttaaattatagtaattatgttgaaaccggtaacgaaaagattacgcaatcttatgaatataactccgataatacacatattttaacggtggaagagataaaagaaaaacttttaacactagaatatgttagaaacgaattgaatgattataaagcttcaatgagataggagagattgacgttgaatattgtaattacaggagcaaaaggttttgtaggaaaaaacttgaaagcagatttaacatcaacgacagatcatcatattttcgaagtacatcgacaaactaaagaggaagaattagagtcagcattgttgaaagcagactttatcgtgcatttagcgggtgttaatcgacctgaacatgacaaagaattcagcttaggaaacgtgagttatttagatcatgtacttgatatattaactagaaatacgaaaaagccagcgatattattatcgtcttcaatacaagcaacacaagataatccttatggtgagagtaagttgcaaggggaacagctattaagagagtatgccgaagagtatggcaatacggtttatatttatcgctggccaaatttattcggcaagtggtgtaagccgaattataactcagtgatagcaacattttgttacaaaattgcacgtaacgaagagattcaagttaatgatcggaatgttgaactaacgctaaactacgtggatgatatcgtcgctgaaataaagcgtgctattgaaggaactccaacgattgaaaatggtgtacctacagtaccaaacgtatttaaagtgacattgggagaaattgtagatttattatacaagttcaaacagtcacgtctcgatcgaacattgccgaaattagataacttgtttgaaaaagatttgtatagtacgtatttaagctatctacctagtacagactttagttatcccttacttatgaatgtggatgataggggttcttttacagaatttataaaaacaccggatcgtggtcaagtttctgtaaatatttctaaaccaggtattactaaaggtaatcactggcaccatactaaaaacgaaaaatttctagtcgtatcaggtaaaggggtaattcgttttagacatgttaatgatgatgaaatcattgaatattacgtttctggcgataaattagaagttgtagacataccagtaggatacacacataatattgaaaatttaggcgacacagatatggtaactattatgtgggtgaatgaaatgtttgatccaaatcagccagatacgtatttcttggaggtatagcgcatggaaaaactgaaattaatgacaatagttggtacaaggcctgaaatcattcgtttatcatcaacgattaaagcatgtgatcaatattttaatcagatattagtacacactggtcaaaattatgattatacattgaatcaaattttctttgatgatttggaattaagacaaccggaccactacttagaggcagttggaagtaaccttggagaaacgatggggaatattattgcgaagacatatgacgttttattacgcgaacaaccagatgcacttttaattcttggtgatacaaatagttgtttagcagcagtatctgctaaacgattaaagattcctgtgttccacatggaagcgggtaatagatgctttgatcagaatgtacctgaagaaatcaatcgtaaaattgttgaccatgtcagtgatgtgaatctaccttatacagaacatagcagacggtatttattagatgaaggcttcaataaagcgaatatctttgtgacaggatcaccgatgacagaagtgatagaagcgcatcgagataaaattaatcacagtgacgttttaaataaactaggattagaaccgcaacaatacattttagtatctgcgcatagagaagagaatatcgataatgaaaagaattttaaatcattaatgaatgcgataaatgatattgccaaaaagtataaaatgcctgtgatttattcaacgcatccaagaagttggaagaaaattgaagaaagtaaatttgaatttgatccattagttaaacagttaaagccatttggtttctttgattataatgcattgcaaaaagatgcatttgttgtgctatcagatagtggaacattgtcagaagagtcgtctattttgaagttccctggtgtccttattcgaacttccacagaaagaccggaagtactagataaaggtacggttattgtaggtggtattacctataacaatctaatccaatccgttgaactagcaagagagatgcaaaacaataacgaaccgatgattgatgctattgattataaagacactaacgtttcgacaaaggtagttaaaattattcaaagctataaagatattatcaatcgaaatacttggaggaaatgacgatgaggatagcgattgaaaagataattggtttgctgaaaaaccagtcctctaaagaatcgaatgttaagattcatcgcttggcgtatattacaaactcaaaatttgatggcaataactatatagatagatggtgtaaaatcaggaattctcacattggtgaatacagttatattggatttggtagtgattttaataatgtagaagtaggaagatattgttcgatatcttcggatgtaaaaattgggttaggaaaacatcctacacacttttttagctcatcaccgattttttattctaataataatccatttaacataaagcaaaagtttatagactttaatgaccaaccaagccgtacaacaattaaaaatgatgtgtggattggtgcaaatgtaattattatggatggattaacaataaatactggtgcagtcatagcagccggctcagttgttactaaaaatgtaggagcatatgaggttgttggtggggttcctgcaaaagtgattaagaagcgatttgacaataaaacaattgaaaaacttttggaaagcaagtggtgggagaaaacgcctgacaaactaaaaggattttcggttgaatatttaaataaaaaggatacttaatgatatgagaattttaaatattgtatcgagtaatattgttcaagacccaagggtacttaaacaaatagaaacaattaaaggcgttacgaatgattataaaattgttggaatgaataattcacaagctactaataggcgattggaaaatttagattgtaattatcgtttgttaggtagcaaggtagatcccaaaaatattctttctaaattaattaagcgtataagatttgcaacaggtgttatccgagaaattaaagcttttaaacctgacgtgattcatgcaaatgatttcgacgtattattaatggtctatttaagcaattataaaaaagctaatattgtttatgatgcgcatgaaatatatgcgaaaaatgcctttattaataaagttccacttatttcaaagtttgtagaaagtatagaaaaacacatagtaaaacatcgtgttaatgccttcgtaacagtaagtcatgcagcaaaagaatattatcaatctaaaggatataagaaggaagcgaatgttattacgaatgcacctattttaaatgatagcagagaatttaaagaaatcgaaaactttaaagaaatcgtatatcaaggtcaaattgtaatggacagaggatatgaagagtttattattgcttcatcagcttttaaacaaaatgctccttcattcataattcgagggtttggtccgcatgaagaagtgataaaagaactgattagttataactcggaaaatattaggttggataaaccagttgaagtaaaagaattggttgataagttagcagaaagtaatgttggtgttatcttgacgaaacctgtatctattaattttgaatatacagtatctaataaaatttttgaatgtatacatgctggtttaccagtaattttatctcctgtcaaagagcatatttatctcaatgaaaaatataaatttggcattgttttaaaggaagttacgccgttagaaattgaaaaggcggttagaaaattaagagataatcacgatttgtttaatcatttacgtcaaaatgcaattaaggcgtctaaaattttgaattggcaaatagaaagtgaacgattagtagaattatataaattttaaagagaggtaaactatgaaattttttgtactttgtgcaattatcagcatgaacatatttatagtaatctctacatttactaaagaagtattagggttccctatagagccggtgtattactcaaccatggttggtatagcattaattactacggtgtttgctatttataagataattgtcacgcaagaaattccgcgagggttaatattattaattgctatatgtttgctttatctagctttttattatttttcaccagataaggaagagaaactagctaaaaataatattctattctttttaacatgggcagttccagcggcaattagtggtatttatattaaatatataaacaaggctacggtagaaagattttttaaattagtatttttcatattttctatttcatttatttttgtaattttaataccaaaacttacaggtgagatacctagctatatcaattttggacttatgaactatcaaaacgcttcgtacctttcagcatttactgccggattaggcatttatttcattatgaaaggttcagtgaaacataagtggatatatgttctatttacaataattgatatccctattgtgtttataccaggagggcgtggaggtgctattttattaattctttacggcttatttgcatttatacttattacgtttaaaagaggaatacctattgcagtaaaaagcattatgtatatttttgcattaagcatatctagtgtattgatttactttctttttacaaaaggttcgaatactagaacattttcatatctacaaggtggaacacttaatttagaaggtacttctggaagaggaccgatttatgaaaaaggtatttactttattcaacaaagtccgttattaggctatgggccatttaactattataaactaatcggaaatataccacataacatcattattgagttgattctatcatttggcttattagggttttttatcataatgatttgcattttgctactagtttataaaatgattaggaactatgatccaaacactatagatttactcgttatgtttatagcaatctatccaatcacattattaatgtttagttcaaattatttagttgtaagtgaattttggtttgtgttgttctattttattacaaaaggacggcgtcatcatggttaagaaagtttttattatggatagcgtaaagacaataattggtacgttgcttatagctttaggattacaatttttagcttatccaattattaatcaacgagtaggtaatgaagcgtttggttctattttaacgatttatacaataataacaatcacgagtgttgtattaggcaatacgcttaacaatatacgattaattaatatgaatctatacaaatccaatcattactactggaaatttgtgtcgatacttttaatttcaattctgattgagagtatagctttaattattgtatttctttacttttttaatttgaacaccatcgatattatctttttaattctacttaatattttaatgtgtttaaggatttatctgaatgtattttttaggatgactttaaaatataatcagattttgtatattgctcttattcaatttttaggtttgctgataggactatttctatattatttaatccaaaactggattgtttgttttattaccagtgaattgtttgcaacgatatatacattggttaaattacggggattaactataggcgagtatcaaagtgaagataataatgtggtcaaagattatgtgatgctactgagtacaaatagccttaataatttgaatctctacttagatagattaatcttattaccaattataggtggaacagctgtaactatatcatttctttcaacatttattgggaaaatgttagctacatttctgtatccgattaataatgtagtactttcatatatttctgtaaatgaaagcgacaatataaagaagcaatatttgaaaactaatctatttgctatagctgcactatgtttagtcatgattatatgttatccaattacattaattattgtctctttactgtataacattgattcaagtttatattcgaagtttattattttaggtaatataggtgttttattcaatgcagtgagtattatgatccaaactttaaatacaaaacacgcatcaataacattacaagcgaattatatgacgcttcacacgattacatttatattcataactattttaatgacaattgcgtttggtctaaatggattcttttggacaacgctgttcagcaacattattaagtatgtgattttaaatattataggtttaaagtctaaattcattaataaaaaggacgtcgattagatgagtgaaaaaaagattttgattttatgtcagtatttttatccggaatatgtatcttctgcgacgttaccaactcaattggcggaagatttaattgcgaatcacattaatgtcgatgtcatgtgtggatggccatatgaatatagtaatcataaacaggtttctaaaaccgagatgcatcgtggaattcgcattcgacgtctcaagtattcgaggtttaataacaaaagtaaggttggaaggatcatcaatttctttagtttattttcaaaattcgtgattaatatacctaaaatgttgaaatatgatcagattcttgtttactctaatccaccaatcttgccattaataccagacgttttacacagactgcttaagaaaaaatattcttttgtggtgtatgatatagcacctgataatgcgattaagacaggtgcaactcgtccaggtagcatgattgataagctgatgcgttacattaatagacatgtctacaagaatgctgaaaatgtcattgtccttggtacggaaatgaaaaactacttactaaatcatcaaatttctaaaaatgctgacaatatccatgtgattcctaactggtatgacatgcgtcaattacaagacaatcgtatctataatgacacatttaaagcttaccgtgagcaatacgacaaaattttattgtatagcggtaatatggggcagttacaggatatggagacacttatctcatttttaaaattaaataaggatcagcctcaaacgttaacaatactttgtggtcatggtaagaaatttgcagatgtcaaaacggcaatagaagaccatcgtattgaaaatgttaaaatgtttgagtttttaacaggtacagactatgctgacgtattaaaaattgcggatgtatgtattgcatcgctgattaaagaaggcgtcggtttaggcgttccgagcaagaattatggctaccttgcagctaagaaaccgttggtactcatcatggataagcaatctgatatcgttcaacatgttgaacaatatgatgcgggtatccaaattgataatggcgatgcacatgccatttataacttcatcaacactcactcgagtaaggaattgcacgagatgggtgagcgcgcacatcaactgtttaaagataaatatacgagagaaattaatactatgaagtattacaatctgttgaagtgaggagataattatgaagcgattattcgatgtagtgagttcaatatatggtttagtagttttaagtccgattctgttaattacagcattactaattaaaatggaatcacctggaccagccattttcaaacaaaaaagaccgacgattaataatgaattgtttaatatttataagtttagatcaatgaaaatagacacacctaatgttgcaactgatttaatggattcaacatcgtatataacaaagacagggaaggtcattcgtaagacctctattgatgaattgccacaattattgaatgttttaaaaggagaaatgtcaattgtaggtcctagaccagcgctttataatcaatacgaattaatcgaaaaacgtacaaaagcgaacgtgcatacgattagaccaggtgtgacaggactagctcaagtgatggggagagatgatattactgatgatcaaaaagtagcgtatgatcattattacttaacacatcaatctatgatgcttgatatgtatatcatatataaaacaattaaaaatatcgttacttcagaaggtgtgcatcactaatgagaaaaaatattttaattacaggcgtacatggatatatcggtaatgctttaaaagataagcttattgaacaaggacatcaagtagatcaaattaatgttaggaatcaattatggaagtcgacctcgttcaaagattatgatgttttaattcatacagcagctttggttcacaacaattcacctcaagcaaggctatctgattatatgcaagtgaatatgttgcttacgaaacaattggcacaaaaggctaaagctgaagacgttaaacaatttatttttatgagtactatggcagtttatggaaaagaaggtcaggttggtaaatcagatcaaattgatacacaaacaccaatgaaccctacgaccaactatggtatttccaaaaagttcgctgaacaagcattacaagagttgattagtgattcgtttaaagtagcaattgtgagaccaccaatgatttatggtgcacattgcccaggaaatttccaacggttaatgcaattgtcaaagcgactgccaatcattcccaatattaacaatcagcgcagtgcattatatattaaacatctgacagcatttattgatcaattaatatcattagaagtgacaggcgtgtatcatcctcaagatagtttttactttgatacatcgtcagtaatgtatgaaatacgtcgccaatcacatcgtaaaacggtattgatcaacatgccttcagtgttaaataagtattttaataagttgtcggtctttagaaaattattcggcaatttaacatacagcaatacgttatatgaaaataataatgcacttgaagttattcctggaaaaatgtcacttgttattgcggacatcatggatgaaacgacaaccaaagataaggcataagtcatctattaaataaaatcaacatacaaatcgttttatttggaggttatagtatgaagttaacagtagttggcttaggttatattggtttaccaacatcaattatgtttgcaaagcatggcgtcgatgtgcttggtgttgatattaatcagcaaacgattgataagttacaaagtggtcaaattagtattgaagaacctgggttacaagaggtttatgaagaggtactgtcatcgggaaaattgaaggtatctacaacgccagaagcatctgatgtttttatcattgccgttccgacgccgaataatgatgatcagtaccggtcatgtgacatttcgctagttatgcgtgcattagatagtattttaccatttttagaaaaagggaatactattattgtagagtcgacaattgcgcctaaaacgatggatgattttgtaaaaccagtcattgaaaatttaggatttacaataggtgaagatatttgtttagtgcattgtccagaacgtgtactgccaggaaaaattttagaagaattagttcataacaatcgtatcattggcggtgtgactaaagcttgtattgaagcgggtaaatatgtctatcgcacattcgttcagggagaaatgattgaaacagatgcacgtactgctgaaatgagtaagctaatggaaaacacatatagagacgtgaatattgctttagctaatgaattaacaaaaatttgcaataacttaaatattaatgtattagatgtgattgaaatggcaaacaaacatccgcgtgttaatatccatcaacctggtccaggtgtaggcggtcattgtttagctgttgatccgtactttattattgctaaagaccctgaaaatgcaaagttaattcaaactggacgtgaaattaataattcaatgccggcctatgttgttgatacaacgaagcaaatcatcaaagcgttgagcgggaataaagtcacagtatttggtttaacttataaaggtgatgttgatgatataagagaatcgccagcatttgatatttatgagctattaaatcaagaaccagacatagaagtatgtgcttatgatccacatgttgaattagattttgtggaacatgatatgtcacatgctgtcaaagacgcatcgctagtattgattttaagtgaccactcagaatttaaaaatttatcggacagtcattttgataaaatgaagcataaagtgatttttgatacaaaaaatgttgtgaaatcatcatttgaagatgtatcgtattataattatggcaatatatttaattttatcgacaaataaaatgtgtcaaactagggcatacatgattaaggaaagataagctgtcatgtgtttgaacttcagagaggataatgttatgaaaaaaattatggttattttcggtacgagacccgaagcaataaaaatggcaccattagtaaaagaaattgatcataatgggaactttgaagcgaacattgtgattacagcacaacatagagatatgttagatagtgtgttaagtatatttgatattcaagctgatcatgatttaaatattatgcaagatcaacaaacgttagcggaccttacggcgaatgcgcttgctaaacttgatagcatcattaatgaggaacagccggatatgattttagtacatggtgatactacaacgacttttgtaggaagtttggcagcattttatcatcaaattccggttggacatgtagaagctggacttcgaacacatcagaaatactcaccatttcctgaagagttaaatcgagtcatggtaagtaatattgctgaattgaattttgcgccaacagtaattgcagctaaaaatttactttttgaaaacaaagacaaagagcgtatctttattactggaaatacagttattgacgcattgtcaacaacagttcaaaatgattttgtttcaacgattattaataaacataaaggcaagaaagttattttactaacagcgcatcgtcgtgaaaatattggggaaccgatgcatcagatttttaaagcagtaagagatttggcagatgaatataaagatgttgtcttcatttatccaatgcatcgtaatccaaaggtaagagcgattgccgaaaaatatttatctgggagaaatcggattgaattaattgagccattagatgcgattgagttccataattttacaaatcaatcgtacctcgtgctgacagattctggtggtattcaagaggaggctcctacatttggaaaacctgtgttggtattaaggaatcatacagagcgtcccgaaggcgttgaggcgggaacatcgagagtaattggcacagattatgacaatattgttcgaaatgtgaaacaattgattgaggatgatgaagcgtatcaacgtatgagtcaagcgaataatccatatggtgatggacaagcatcacgacgtatttgtgaagcaatagaatattattttggattgcgctcagacaagccggatgaattcgtacctttacgtcacaaataa

SEQ ID NO: 107 - DNA, 4160 bp, Staphylococcus aureus
atgattagtactttgaatgaaattatgaaatgtatcgaagacaacgatacaattattatacacagacatgttagaccagatccagatgcatatggttcacaacttggtttaaaatactatattcagcagaaatttccgcaaaagcaagtatttgcagtgggtgaagcggaatcatcattaagttttattggagagttggataacattgatgataaaacatatcaagatgcgcttgtaattgtatgtgatactgccaatgctccacgaattgacgatgaacgatatagtacaggtagtaaacttattaaaatagatcatcatcctgcagttgatcagtatggtgatattaatttagttaatacgaacgcgtcatctacaagtgaaatcatttatgatttaatctcacattttaatgatgaagcaattgttaataaagatatcgcgagtgttttataccttggtatcgtcggtgatactgggcgattcctttttaacaatacctcagaacatactatggaaattgctggaaagttaattgggcatgatattgatcataatgcgctattaaataaaatgatggagaaggacccaaaaatgttgccgtttcaaggttatgttttacaacatttcgaacttatggatgatggattctgccaagttaaaataactgaagatgtattggagcaattcggtattcagccaaatgaagcatctcagtttgttaatacaattgctgacatcaaaggtttgaaaatatgggtgtttgcagttgatgagggtagtgaaataagatgtcgcttacgctctaaagggcaattgattattaatgatattgcgcaagattttggtggcggtggccatccgaatgcgtcaggagtttcagtgaacagctgggatgaatttgagcaacttgctacagctttacgcacaaaacttaactaatagaaaggagccattcaatcatggtggcatatttaaatattcatacggcttatgatttgttaaattcaagcttaaaaatagaagatgccgtaagacttgctgtgtctgaaaatgttgatgcacttgccataactgacaccaatgtattgtatggttttcctaaattttatgatgcatgtatagcaaataacattaaaccgatttttggtatgacaatatatgtgacaaatggattaaatacagtcgaaacagttgttctagctaaaaataatgatggattaaaagatttgtatcaactatcatcggaaataaaaatgaattcaatggaaaatgtttcatttgaactattgcaacaattttcatcgaatttgattatcatttttaaaaatgttgcagacgaacatcgtgacattgttcaagtttttgattcgcatgaagatacgtatttagatcatcaaagtgttttagttcagggtataaagcacgtatggattcaaaatgtttgttaccaaacacgtcaagatgccgatacgatttctgcattagcagctattagagacaatgcaaaattagacttaattcatgatcaagaagattttggtgcacattttttaactgaaaaggaaattaaacaattagatattaaccaagaatatttaacgcaggttgatgttatagctcaaaagtgtaatgcagaattaaaatatcatcaatctctacttcctcaatatcagacacctaacgatgaatcagctaaaaaatatttgtggcgtgtcttagttacacaattgaaaaaattagaacttaattatgacgtctatttagagcgattgaaatatgagtataaagttattactaatatgggttttgaagattatttcttaatagtaagtgatttaatccattatgcgaaaacgaatgatgtgatggtaggtccaggtcgtggttcttcagctggctcactggtcagttatttactaggtattacaacgattgatcctattaaattcaatctattatttgaacgttttttaaacccagaacgtgtaacaatgcctgatatagatattgactttgaagatacacgccgagaaagggttattcagtacgtccaagaaaaatatggcgagctacatgtatctggaattgtgactttcggtcatctgcttgcaagagcggttgctagggatgttggacgaattatggggtttgatgaagttacattaaatgaaatttcaagtttaatcccacataaattaggaattacacttgatgaagcatatcaaattgacgattttaaaaaatttgtacatcgaaaccatcgacatgaacgctggttcagtatttgtaaaaagttagaaggtttaccaagacatacatctacacatgcggcaggaattattattaatgaccatccattatatgaatatgcccctttaacgaaaggggatacaggattattaacgcaatggacaatgactgaagccgaacgaattgggttattaaaaatagattttctagggttgagaaacttatcgattattcatcaaatcttaatacaagtcaaaaaagatttaggtattaatattgatatcgaaaagattccgttcgatgatcaaaaagtgtttgaattgttgtcgcaaggagatacgactggcatattccaattagagtcagacggtgtaagaagtgtattaaaaaaattaaagccggaacactttgaagatattgttgctgtaacttctttgtatagaccaggtccaatggaagaaattccaacttacattacaagaagacatgatccaagcaaagttcaatatttacatccacatttagaacctatattaaaaaatacttacggtgttattatttatcaagagcaaattatgcaaatagcgagcacatttgcaaacttcagttatggtgaagcggatattttaagaagagcaatgagtaaaaaaaatagagctgttcttgaaagtgagcgtcaacattttatagaaggtgcaaagcaaaatggttatcacgaagacattagtaagcaaatatttgatttgattctgaaatttgctgattatggttttcctagagcacatgctgtcagctattctaaaattgcatacattatgagctttttaaaagtccattatccaaattatttttacgcaaatattttaagtaatgttattggaagtgagaagaaaactgctcaaatgatagaagaagcaaaaaaacaaggtatcactatattgccaccgaacattaacgaaagtcattggttttataaaccttcccaagaaggcatttatttatcaattggtacaattaaaggtgttggttatcaaagtgtgaaagtgattgttgatgaacgttatcagaacggcaaatttaaagatttctttgattttgctagacgtataccgaagagagtcaaaacgagaaagttacttgaagcactgattttagtgggagcgtttgatgcttttggtaaaacacgttcaacgttgttgcaagctattgatcaagtgttggatggcgatttaaacattgaacaagatggttttttatttgatattttaacgccaaaacagatgtatgaagataaagaagaattgcctgatgcacttattagtcagtacgaaaaagaatatttaggattttatgtttcgcaacacccagtagataaaaagtttgttgccaaacaatatttaacgatatttaaattgagtaacgcgcagaattataaacctatattagtacagtttgataaagttaaacaaattcgaactaaaaatggtcaaaatatggcattcgtcacattaaatgatggcattgaaactttagatggtgtgattttccctaatcagtttaaaaagtacgaagagttgttatcacataatgacttgtttatagttagcgggaaatttgaccatagaaagcaacaacgtcaactaattataaatgagattcagacattagccacttttgaagaacaaaaattagcatttgccaaacaaattataattagaaataaatcacaaatagatatgtttgaagagatgattaaagctacgaaagagaatgctaatgatgttgtgttatccttttatgatgaaacgattaaacaaatgactactttaggctatattaatcaaaaagatagtatgtttaataattttatacaatcctttaaccctagtgatattaggcttatataa

SEQ ID NO: 108 - DNA, 10214 bp, Staphylococcus aureus
atgaacataaataaaaaagtaacattacaacgaattcaaactttaactgagcttcatggggcaccaggttttgaagaagaagtaaaaaattatatgactcagcaaatggcgccgtatgtagatgaatttattgaaaatcgtatgggtggattttttggtgtgaaaaaatctaaaaatccaaatgcaaaacgtgtaatgattgcagcacatatggatgaaatcggatttatgattacaaatatcactaaaaatggaatgattcaattcacaaatttaggtggtgttgcaaatgatatttggcaaggacaacgcttagtaattaaaaatagaaatggcgataaaattatcggtgttgtttctaatatacctaaacattttcgtactggtagtgaaggtgcaccggaaattaaagatttaacattagatataggtgctcaaaatgaagatgaggtgcgtgagcgcggaatagatataggagatacaattgtacctcacacgccattcacacagttatctgaacatcgatatagtgctaaagcatgggataatcgttatggttgtgtcttggcaattgaaatactagaattattaaaagatatagaattagatgtagacttgtatgttggcgcaaatgttcaagaagaggttggattacgaggtgcgaaagcatctgcagagatgatagacccagacgttgcatttgtagtcgattgttcacctgccaatgacgttaaaggaaaccaaccattatctggtgaacttggtaaagggacgttaattcgcataaaagacggtacaatgattttaaagcctgtatttagagattatttattaaagttagtagaagcacatgacattgaacatcaatactatatgtcaccaggtggaacagatggtggagaaattcataaagctaatattggtattccgactgcagttattggtgtatgtgcacgatatattcatagtacagactcagtatttgatataagagactattttgcagctagatctttactttcagaagccatttgtaatttagataataatcaaatagaaacattacaatataaataatcgggtaataacaactattatctctaaatagttatatataatcattaattaaggagacataaaaatgaaacaacttgaatcagaacaacaatttgaatctttaaaacaaggtgctacagtatttgaattcactgcaggctggtgtccagattgtagagtgatagaaccagatttaccggaattagaagcgagatatcctatgtttgacttcgtatcagtagaccgtgacaaatttatggatatttgtattgaaaatggtattatggggattccaagttttctagtatataaaaatggtgaactgcttggaagttatattggaaaagaacgaaaatcaattgaacagatagatgcatttttagctcaatatgtgtaatttagactagagaaaaacggggtaatactcgtttttctctgttactatgtgttgatttattgtaaactattataaggtgcgaaattaggagtgttacatatgaatacctttcaaatgagagataaattaaaggaacgtttaagccatttagacgttgattttaaatttaatcgtgaagaagaaactttgcgtatttatcgaacagataataacaaaggtatcacgattaaacttaacgctatagtcgcaaaatatgaagataaaaaagaaaaaattgtagatgaaattgtttattacgttgatgaagctattgcacaaatggcagataaaacccttgagagtatatcatctagtcaaattatgcctgtcattagagcgactagctttgataaaaaaactaaacaaggtgttccttttatctatgatgagcatactgcagaaacagcagtttattatgcagtcgatttagggaaatcatatcgtctaattgacgaaagcatgttagaggatttgaagttaactgaacaacaaataagagaaatgtctctgtttaatgttagaaaattgtcaaattcatatacgactgatgaagtaaaaggtaatattttttattttattaactcaaatgacgggtatgatgcaagtaggatactaaatactgcatttttaaatgaaattgaggcacaatgtcaaggcgaaatgctcgtagcagtgccacaccaagatgtgttaattattgcagatatacgcaataaaacaggatatgatgtgatggcacatttaacaatggaatttttcactaaaggtctagttccaattacatcattatcctttggatataaacagggtcatcttgaaccgatatttattttaggtaaaaataataaacaaaaaagagatccaaacgtgattcagcgtttagaagcaaatcgtcgtaaatttaataaagataaatagaaataattggataaggagttttgtcataatgaatttattttacaatcctaaatatgtaggagatgtcgcatttttacaaattgaaccagttgaaggtgaattaaactacaataaaaaaggtaatgttgttgaaattactaatgaaggtaatgttgtaggttataatatttttgaaatttcaaaagatataacaattgaagaaaaaggtcatattaaattaactgatgaacttgtaaatgtattccaaaagcgtatttcagaagctggttttgattataaattaaatgctgatctatcaccgaaatttgtagttggctacgttgaaactaaagacaaacatcctgatgcagataaattaagtgtactaaatgtaaacgttggaaatgacacattacaaattgtatgtggcgcgcctaacgttgaagctggacagaaagttgttgttgctaaagtaggtgcagtgatgcctagcggtatggtaattaaagatgctgaattacgtggtgttgcctcaagcggtatgatttgttcaatgaaagaattgaatttacctaatgcacctgaagaaaaaggtattatggtattaaatgacagctatgaaattggacaagcattttttgaataattaaggaaggtagtgaaaatatgagctggtttgataaattattcggcgaagataatgattcaaatgatgacttgattcatagaaagaaaaaaagacgtcaagaatcacaaaatatagataacgatcatgactcattactgcctcaaaataatgatatttatagtcgtccgaggggaaaattccgttttcctatgagcgtagcttatgaaaatgaaaatgttgaacaatctgcagatactatttcagatgaaaaagaacaataccatcgagactatcgcaaacaaagccacgattctcgttcacaaaaacgacatcgccgtagaagaaatcaaacaactgaagaacaaaattatagtgaacaacgtgggaattctaaaatatcacagcaaagtataaaatataaagatcattcacattaccatacgaataagccaggtacatatgtttctgcaattaatggtattgagaaggaaacgcacaagtcaaaaacacataatatgtattctaataatacaaatcatcgtgctaaagattcaactccagattatcacaaagaaagtttcaagacttcagaggtaccgtcagctatttttggcacaatgaaacctaaaaagttagaaaatggtcgtatccctgtaagtaaaccttcagaaaaagttgagtcagataaacaaaaatatgataaatatgtagctaagacgcaaacgtctcaaaataaacaattagaacaagaaaaacaaaatgatagtgttgtcaaacaaggaactgcatctaaatcatctgatgaaaatgtatcatcaacaacaaaatcaatgcctaattattcaaaagttgataatactatcaaaattgaaaatatttatgcttcacaaattgttgaagaaattagacgtgaacgagaacgtaaagtgcttcaaaagcgtcgatttaaaaaagcgttgcaacaaaagcgtgaagaacataaaaacgaagagcaagatgcaatacaacgtgcaattgatgaaatgtatgctaaacaagcggaacgctatgttggtgatagttcattaaatgatgatagtgacttaacagataatagtacagatgctagtcagcttcatacaaatggcatagagaatgaaactgtatcaaatgatgaaaataaacaagcgtcaatacaaaatgaagacactaatgacactcatgtagatgaaagtccatacaattatgaggaagttagtttgaatcaagtatcgacaacaaaacaattgtcagatgatgaagttacggtttcgaatgtaacgtctcaacatcaatcagcactacaacataacgttgaagtaaatgataaagatgaactaaaaaatcaatccagattaattgctgattcagaagaagatggagcaacgaataaagaagaatattcaggaagtcaaatcgatgatgcagaattttatgaattaaatgatacagaagtagatgaggatactacttcaaatatcgaagataataccaatagaaacgcgtctgaaatgcatgtagacgctcctaaaacgcaagagcacgcagtaactgaatctcaagttaataatatcgataaaacggttgataatgaaattgaattagcaccgcgtcataaaaaagatgaccaaacaaacttaaatgtcaactcattgaaaacgaatgatgtgaatgatggtcatgttgtggaagattcaagcatgaatgaaatagaaaagcataacgcagaaattacagaaaatgtgcaaaacgaagcagctgaaagtgaacaaaatgtcgaagagaaaactattgaaaacgtaaatccaaagaaacagactgaaaaggtttcaactttaagtaaaagaccatttaatgttgtcatgacgccatctgataaaaagcgtatgatggatcgtaaaaagcattcaaaagtcaatgtgcctgaattaaagcctgtacaaagtaaacaagctgtgagtgaaagcaagcctgcgagtcaagccgcaccatcatcaagatctgattcacaagagtcaaacacaaatgcatataaaacaaataatatgacatcaaacaatgttgagaacaatcaacttattggtcatgcagaaacagaaaatgattatcaaaatgcacaacaatattcagagcagaaaccttctgctgattcaactcaaacggaaatatttgaagaaagccaagatgataatcaattggaaaatgagcaagttgatcaatcaacttcgtcttcagtttcagaagtaagcgacataactgaagaaagcgaagaaacaacacatccaaacaatactagtggacaacaagataatgatgatcaacaaaaagatttacagccttcattttcaaatcaaaatgaagatacagctaatgaaaatagacctcggacgaaccaacaagatgttgcaacaaatcaagctgtacaaacatctaagccgatgattcgtaaaggcccaaatattaaattgccaagtgtttcattactagaagaaccacaagttattgagtcggacgaggactggattacagataaaaagaaagaactgaatgacgcattattttactttaatgtacctgcagaagtacaagatgtaactgaaggtccaagtgttacaagatttgaattatcagttgaaaaaggtgttaaagtttcaagaattacggcattacaagatgacattaaaatggcattggcagcgaaagatattcgtatagaagcgcctattccaggaactagtcgtgttggtattgaagttccgaaccaaaatccaacgacagtcaacttacgttctattattgaatctccaagttttaaaaatgctgaatctaaattaacagttgcgatggggtatagaattaataatgaaccattacttatggatattgctaaaacgccacacgcactaattgcaggtgcaactggatcagggaaatcagtttgtatcaatagtattttgatgtctttactatataaaaatcaccctgaggaattaagattattacttatcgatccaaaaatggttgaattagctccttataatggtttgccacatttagttgcaccggtaattacagatgtcaaagcagctacacagagtttaaaatgggccgtagaagaaatggaacgacgttataagttatttgcacattaccatgtacgtaatataacagcatttaacaaaaaagcaccatatgatgaaagaatgccaaaaattgtcattgtaattgatgagttggctgatttaatgatgatggctccgcaagaagttgagcagtctattgctagaattgctcaaaaagcaagagcatgtggtattcatatgttagtagctacgcaaagaccatctgtcaatgtaattacaggtttaattaaagccaacataccaacaagaattgcatttatggtatcatcaagtgtagattcgagaacgatattagacagtggtggagcagaacgcttgttaggatatggcgatatgttatatcttggtagcggtatgaataaaccgattagagttcaaggtacatttgtttctgatgacgaaattgatgatgttgttgattttatcaaacaacaaagagaaccggactatctatttgaagaaaaagaattgttgaaaaaaacacaaacacaatcacaagatgaattatttgatgatgtttgtgcatttatggttaatgaaggacatatttcaacatcattaatccaaagacatttccaaattggctataatagagcagcaagaattatcgatcaattagagcaactcggttatgtttcgagtgctaatggttcaaaaccaagggatgtttatgttacggaagcagatttaaataaagaataattatgagtaaggagttttatataatgacacactatcattttgtcggaattaaaggttctggcatgagttcattagcacaaatcatgcatgatttaggacatgaagttcaaggatcggatattgagaactacgtatttacagaagttgctcttagaaataaggggataaaaatattaccatttgatgctaataacataaaagaagatatggtagttatacaaggtaatgcattcgcgagtagccatgaagaaatagtacgtgcacatcaattgaaattagatgttgtaagttataatgattttttaggacagattattgatcaatatacttcagtagctgtaactggtgcacatggtaaaacttctacaacaggtttattatcacatgttatgaatggtgataaaaagacttcatttttaattggtgatggcacaggtatgggattgcctgaaagtgattatttcgcttttgaggcatgtgaatatagacgtcactttttaagttataaacctgattacgcaattatgacaaatattgatttcgatcatcctgattattttaaagatattaatgatgtttttgatgcattccaagaaatggcacataatgttaaaaaaggtattattgcttggggtgatgatgaacatctacgtaaaattgaagcagatgttccaatttattattatggatttaaagattcggatgacatttatgctcaaaatattcaaattacggataaaggtactgcttttgatgtgtatgtggatggtgagttttatgatcacttcctgtctccacaatatggtgaccatacagttttaaatgcattagctgtaattgcgattagttatttagagaagctagatgttacaaatattaaagaagcattagaaacgtttggtggtgttaaacgtcgtttcaatgaaactacaattgcaaatcaagttattgtagatgattatgcacaccatccaagagaaattagtgctacaattgaaacagcacgaaagaaatatccacataaagaagttgttgcagtatttcaaccacacactttctctagaacacaagcatttttaaatgaatttgcagaaagtttaagtaaagcagatcgtgtattcttatgtgaaatttttggatcaattagagaaaatactggcgcattaacgatacaagatttaattgataaaattgaaggtgcatcgttaattaatgaagattctattaatgtattagaacaatttgataatgctgttgttttatttatgggtgcaggtgatattcaaaaattacaaaatgcatatttagataaattaggcatgaaaaatgcgttttaatatgtttataatagagtagtatgggtatttattattaatgacattattacatgttaattaggaggcgtttttaatggattggattttaccaattgctggaattatcgctgcgattgcattcttaattttatgtatcggtatcgtagctgtattaaattctgttaagaaaaacttagattatgttgcaaaaacacttgacggtgtagaaggtcaagttcaaggtattactcgtgaaacaacagatttacttcataaagtaaaccgtttaactgaggatatccaaggtaaagtagatcgtttaaactcagttgtagatgctgttaaaggtatcggtgactcagtacaaacgttaaacagctctgtagatcgtgtaacaaattcaattacacataatatttctcaaaatgaagataaaatctcacaagttgttcaatggtcaaatgttgcaatggaaattgcagacaaatggcaaaatagacactaccgtcgtggaagtgcaaattacaaagctaataatgtagcaactgatgcaaatcatagctatacttctagagtagataaataattaataattaaacaaatgcacttaaatgaggttgttacttatttaagtgcatttgttataggaggatatacaaatgacgcagcaacaaaatgataaaagaacattaaaaaataaacacacttatcaaaatgaaccactaccaaaccgtaaagattttgttgttagttttataactggcgcgcttgttggttcagctttaggtttgtattttaaaaataaagtttatcaaaaagcagatgatttaaaagtcaaagaacaagaactgtcgcaaaagtttgaagaaagaaaaacgcaacttgaagaaacggttgcctatacaaaagaacgtgttgaaggatttttaaacaaatctaaaaatgagcaagcggcattaaaggcacaacaagcagcgataaaagaagaagcaagtgcaaataatttaagtgatacatcacaagaagcacaagagattcaagaagctaaaagagaagcacaagcagaagcggataaaagtgtggctgtatcaaatgaagagtcaaaagcatcggcattaaaagtacaacaagcagcaataaaagaagaagcaagtgcaaataatttaagtgacacgtcacaagaggcacaagagattcaagaagctaaaaaagaagcacaagcagaaacagataaaagtgcagctgtatcaaatgaagaaccaaaagcagtggcattgaaagcacaacaagcagcgataaaagaagaagcaagtgcaaataatttaagtgatacatcacaagaggcacaagaggttcaagaagctaaaaaagaagcacaagcagagaaagacagtgacacatcaactaaagatgcaagtgcagcaaaggtagaagtatcaaaaccagagtcacaagctgaaagattagcaaacgctgcaaaacagaagcaagctaaattaacaccaggttcaaaagagagtcaattaactgaagcgttatttgcagaaaaaccagttgctaaaaatgacttgaaagaaattcctcaattagttactaaaaagaatgatgtatcagagacagagacggttaatatagataataaagacactgttaaacaaaaagaagctaaatttgaaaatggtgttattacacgtaaagctgatgaaaaaacaactaataatacagctgttgacaagaaatcaggtaaacaatctaaaaaaacaacaccttcaaataaacgaaatgcatcaaaagcatctacaaataaaacttcaggtcagaaaaagcaacataataagaaatcatcacaaggtgcaaagaaacaaagtagttcaagtaagttaactcaaaagaataatcaaactagtaataagaattcaaaaacaacaaatgctaaatcatccaatgcatcaaaaacgccaaatgctaaagttgaaaaagctaatagtaaaatagagaaacgtacattcaatgactaa

SEQ ID NO: 109 - DNA, 8217 bp, Staphylococcus aureus
atgaacataaataaaaaagtaacattacaacgaattcaaactttaactgagcttcatggggcaccaggttttgaagaagaagtaaaaaattatatgactcagcaaatggcgccgtatgtagatgaatttattgaaaatcgtatgggtggattttttggtgtgaaaaaatctaaaaatccaaatgcaaaacgtgtaatgattgcagcacatatggatgaaatcggatttatgattacaaatatcactaaaaatggaatgattcaattcacaaatttaggtggtgttgcaaatgatatttggcaaggacaacgcttagtaattaaaaatagaaatggcgataaaattatcggtgttgtttctaatatacctaaacattttcgtactggtagtgaaggtgcaccggaaattaaagatttaacattagatataggtgctcaaaatgaagatgaggtgcgtgagcgcggaatagatataggagatacaattgtacctcacacgccattcacacagttatctgaacatcgatatagtgctaaagcatgggataatcgttatggttgtgtcttggcaattgaaatactagaattattaaaagatatagaattagatgtagacttgtatgttggcgcaaatgttcaagaagaggttggattacgaggtgcgaaagcatctgcagagatgatagacccagacgttgcatttgtagtcgattgttcacctgccaatgacgttaaaggaaaccaaccattatctggtgaacttggtaaagggacgttaattcgcataaaagacggtacaatgattttaaagcctgtatttagagattatttattaaagttagtagaagcacatgacattgaacatcaatactatatgtcaccaggtggaacagatggtggagaaattcataaagctaatattggtattccgactgcagttattggtgtatgtgcacgatatattcatagtacagactcagtatttgatataagagactattttgcagctagatctttactttcagaagccatttgtaatttagataataatcaaatagaaacattacaatataaataatcgggtaataacaactattatctctaaatagttatatataatcattaattaaggagacataaaaatgaaacaacttgaatcagaacaacaatttgaatctttaaaacaaggtgctacagtatttgaattcactgcaggctggtgtccagattgtagagtgatagaaccagatttaccggaattagaagcgagatatcctatgtttgacttcgtatcagtagaccgtgacaaatttatggatatttgtattgaaaatggtattatggggattccaagttttctagtatataaaaatggtgaactgcttggaagttatattggaaaagaacgaaaatcaattgaacagatagatgcatttttagctcaatatgtgtaatttagactagagaaaaacggggtaatactcgtttttctctgttactatgtgttgatttattgtaaactattataaggtgcgaaattaggagtgttacatatgaatacctttcaaatgagagataaattaaaggaacgtttaagccatttagacgttgattttaaatttaatcgtgaagaagaaactttgcgtatttatcgaacagataataacaaaggtatcacgattaaacttaacgctatagtcgcaaaatatgaagataaaaaagaaaaaattgtagatgaaattgtttattacgttgatgaagctattgcacaaatggcagataaaacccttgagagtatatcatctagtcaaattatgcctgtcattagagcgactagctttgataaaaaaactaaacaaggtgttccttttatctatgatgagcatactgcagaaacagcagtttattatgcagtcgatttagggaaatcatatcgtctaattgacgaaagcatgttagaggatttgaagttaactgaacaacaaataagagaaatgtctctgtttaatgttagaaaattgtcaaattcatatacgactgatgaagtaaaaggtaatattttttattttattaactcaaatgacgggtatgatgcaagtaggatactaaatactgcatttttaaatgaaattgaggcacaatgtcaaggcgaaatgctcgtagcagtgccacaccaagatgtgttaattattgcagatatacgcaataaaacaggatatgatgtgatggcacatttaacaatggaatttttcactaaaggtctagttccaattacatcattatcctttggatataaacagggtcatcttgaaccgatatttattttaggtaaaaataataaacaaaaaagagatccaaacgtgattcagcgtttagaagcaaatcgtcgtaaatttaataaagataaatagaaataattggataaggagttttgtcataatgaatttattttacaatcctaaatatgtaggagatgtcgcatttttacaaattgaaccagttgaaggtgaattaaactacaataaaaaaggtaatgttgttgaaattactaatgaaggtaatgttgtaggttataatatttttgaaatttcaaaagatataacaattgaagaaaaaggtcatattaaattaactgatgaacttgtaaatgtattccaaaagcgtatttcagaagctggttttgattataaattaaatgctgatctatcaccgaaatttgtagttggctacgttgaaactaaagacaaacatcctgatgcagataaattaagtgtactaaatgtaaacgttggaaatgacacattacaaattgtatgtggcgcgcctaacgttgaagctggacagaaagttgttgttgctaaagtaggtgcagtgatgcctagcggtatggtaattaaagatgctgaattacgtggtgttgcctcaagcggtatgatttgttcaatgaaagaattgaatttacctaatgcacctgaagaaaaaggtattatggtattaaatgacagctatgaaattggacaagcattttttgaataattaaggaaggtagtgaaaatatgagctggtttgataaattattcggcgaagataatgattcaaatgatgacttgattcatagaaagaaaaaaagacgtcaagaatcacaaaatatagataacgatcatgactcattactgcctcaaaataatgatatttatagtcgtccgaggggaaaattccgttttcctatgagcgtagcttatgaaaatgaaaatgttgaacaatctgcagatactatttcagatgaaaaagaacaataccatcgagactatcgcaaacaaagccacgattctcgttcacaaaaacgacatcgccgtagaagaaatcaaacaactgaagaacaaaattatagtgaacaacgtgggaattctaaaatatcacagcaaagtataaaatataaagatcattcacattaccatacgaataagccaggtacatatgtttctgcaattaatggtattgagaaggaaacgcacaagtcaaaaacacataatatgtattctaataatacaaatcatcgtgctaaagattcaactccagattatcacaaagaaagtttcaagacttcagaggtaccgtcagctatttttggcacaatgaaacctaaaaagttagaaaatggtcgtatccctgtaagtaaaccttcagaaaaagttgagtcagataaacaaaaatatgataaatatgtagctaagacgcaaacgtctcaaaataaacaattagaacaagaaaaacaaaatgatagtgttgtcaaacaaggaactgcatctaaatcatctgatgaaaatgtatcatcaacaacaaaatcaatgcctaattattcaaaagttgataatactatcaaaattgaaaatatttatgcttcacaaattgttgaagaaattagacgtgaacgagaacgtaaagtgcttcaaaagcgtcgatttaaaaaagcgttgcaacaaaagcgtgaagaacataaaaacgaagagcaagatgcaatacaacgtgcaattgatgaaatgtatgctaaacaagcggaacgctatgttggtgatagttcattaaatgatgatagtgacttaacagataatagtacagatgctagtcagcttcatacaaatggcatagagaatgaaactgtatcaaatgatgaaaataaacaagcgtcaatacaaaatgaagacactaatgacactcatgtagatgaaagtccatacaattatgaggaagttagtttgaatcaagtatcgacaacaaaacaattgtcagatgatgaagttacggtttcgaatgtaacgtctcaacatcaatcagcactacaacataacgttgaagtaaatgataaagatgaactaaaaaatcaatccagattaattgctgattcagaagaagatggagcaacgaataaagaagaatattcaggaagtcaaatcgatgatgcagaattttatgaattaaatgatacagaagtagatgaggatactacttcaaatatcgaagataataccaatagaaacgcgtctgaaatgcatgtagacgctcctaaaacgcaagagcacgcagtaactgaatctcaagttaataatatcgataaaacggttgataatgaaattgaattagcaccgcgtcataaaaaagatgaccaaacaaacttaaatgtcaactcattgaaaacgaatgatgtgaatgatggtcatgttgtggaagattcaagcatgaatgaaatagaaaagcataacgcagaaattacagaaaatgtgcaaaacgaagcagctgaaagtgaacaaaatgtcgaagagaaaactattgaaaacgtaaatccaaagaaacagactgaaaaggtttcaactttaagtaaaagaccatttaatgttgtcatgacgccatctgataaaaagcgtatgatggatcgtaaaaagcattcaaaagtcaatgtgcctgaattaaagcctgtacaaagtaaacaagctgtgagtgaaagcaagcctgcgagtcaagccgcaccatcatcaagatctgattcacaagagtcaaacacaaatgcatataaaacaaataatatgacatcaaacaatgttgagaacaatcaacttattggtcatgcagaaacagaaaatgattatcaaaatgcacaacaatattcagagcagaaaccttctgctgattcaactcaaacggaaatatttgaagaaagccaagatgataatcaattggaaaatgagcaagttgatcaatcaacttcgtcttcagtttcagaagtaagcgacataactgaagaaagcgaagaaacaacacatccaaacaatactagtggacaacaagataatgatgatcaacaaaaagatttacagccttcattttcaaatcaaaatgaagatacagctaatgaaaatagacctcggacgaaccaacaagatgttgcaacaaatcaagctgtacaaacatctaagccgatgattcgtaaaggcccaaatattaaattgccaagtgtttcattactagaagaaccacaagttattgagtcggacgaggactggattacagataaaaagaaagaactgaatgacgcattattttactttaatgtacctgcagaagtacaagatgtaactgaaggtccaagtgttacaagatttgaattatcagttgaaaaaggtgttaaagtttcaagaattacggcattacaagatgacattaaaatggcattggcagcgaaagatattcgtatagaagcgcctattccaggaactagtcgtgttggtattgaagttccgaaccaaaatccaacgacagtcaacttacgttctattattgaatctccaagttttaaaaatgctgaatctaaattaacagttgcgatggggtatagaattaataatgaaccattacttatggatattgctaaaacgccacacgcactaattgcaggtgcaactggatcagggaaatcagtttgtatcaatagtattttgatgtctttactatataaaaatcaccctgaggaattaagattattacttatcgatccaaaaatggttgaattagctccttataatggtttgccacatttagttgcaccggtaattacagatgtcaaagcagctacacagagtttaaaatgggccgtagaagaaatggaacgacgttataagttatttgcacattaccatgtacgtaatataacagcatttaacaaaaaagcaccatatgatgaaagaatgccaaaaattgtcattgtaattgatgagttggctgatttaatgatgatggctccgcaagaagttgagcagtctattgctagaattgctcaaaaagcaagagcatgtggtattcatatgttagtagctacgcaaagaccatctgtcaatgtaattacaggtttaattaaagccaacataccaacaagaattgcatttatggtatcatcaagtgtagattcgagaacgatattagacagtggtggagcagaacgcttgttaggatatggcgatatgttatatcttggtagcggtatgaataaaccgattagagttcaaggtacatttgtttctgatgacgaaattgatgatgttgttgattttatcaaacaacaaagagaaccggactatctatttgaagaaaaagaattgttgaaaaaaacacaaacacaatcacaagatgaattatttgatgatgtttgtgcatttatggttaatgaaggacatatttcaacatcattaatccaaagacatttccaaattggctataatagagcagcaagaattatcgatcaattagagcaactcggttatgtttcgagtgctaatggttcaaaaccaagggatgtttatgttacggaagcagatttaaataaagaataattatgagtaaggagttttatataatgacacactatcattttgtcggaattaaaggttctggcatgagttcattagcacaaatcatgcatgatttaggacatgaagttcaaggatcggatattgagaactacgtatttacagaagttgctcttagaaataaggggataaaaatattaccatttgatgctaataacataaaagaagatatggtagttatacaaggtaatgcattcgcgagtagccatgaagaaatagtacgtgcacatcaattgaaattagatgttgtaagttataatgattttttaggacagattattgatcaatatacttcagtagctgtaactggtgcacatggtaaaacttctacaacaggtttattatcacatgttatgaatggtgataaaaagacttcatttttaattggtgatggcacaggtatgggattgcctgaaagtgattatttcgcttttgaggcatgtgaatatagacgtcactttttaagttataaacctgattacgcaattatgacaaatattgatttcgatcatcctgattattttaaagatattaatgatgtttttgatgcattccaagaaatggcacataatgttaaaaaaggtattattgcttggggtgatgatgaacatctacgtaaaattgaagcagatgttccaatttattattatggatttaaagattcggatgacatttatgctcaaaatattcaaattacggataaaggtactgcttttgatgtgtatgtggatggtgagttttatgatcacttcctgtctccacaatatggtgaccatacagttttaaatgcattagctgtaattgcgattagttatttagagaagctagatgttacaaatattaaagaagcattagaaacgtttggtggtgttaaacgtcgtttcaatgaaactacaattgcaaatcaagttattgtagatgattatgcacaccatccaagagaaattagtgctacaattgaaacagcacgaaagaaatatccacataaagaagttgttgcagtatttcaaccacacactttctctagaacacaagcatttttaaatgaatttgcagaaagtttaagtaaagcagatcgtgtattcttatgtgaaatttttggatcaattagagaaaatactggcgcattaacgatacaagatttaattgataaaattgaaggtgcatcgttaattaatgaagattctattaatgtattagaacaatttgataatgctgttgttttatttatgggtgcaggtgatattcaaaaattacaaaatgcatatttagataaattaggcatgaaaaatgcgttttaa

SEQ ID NO: 110 - DNA, 2793 bp, Staphylococcus aureus
atgagtgaaagtaaagaaatggtgcgtggaacctttttaattaccattagtatattaattaccaaggtattgggcgtactttttatcattccattcaactatttaattggtggacaagaaaatatggcgccgttcacatacgcttatgcaccatataatattgcaattgcagttgcgacagcaggtgtaccattagcagcttcgaaatatgttgcgaaatataatgctattggggcatataaagtaagtcagaaattttataaatcgagttttattgtaatgagtattaccggtgttttaggtttcttggtactgtatttcttagcaccttatatttctgaattaacattagctagaaacattcatgataaaaacggttggtcagtcgatgatattacttggattataagaatcattagtatggttgttatctttattcctgtattagcgacatggagagggatattccaaggttataaatctatggggccaacagcagtgtcagaagtaactgagcaaattgcacgcgtgattttcatattaatcggaagttatttagtactaaatgtctttgatggctctattttattagccaatggtattgctacttttgcagcagcagttggtgcgattattggtatattcacactctggtattactggagaaagcgtaagcataatattgatcgtatggtcgaatctgattacacagatatagatgtgtcatatggcaagatgtataaagaaattattgcttatagtataccgttcgttattgtaagtttgaattatccattatttaacttagtagatcaatttacacataacggtgctttatctttagttggtataccttcacagttacaagatatattctttaatatgctaaatatgtcaactaataaaattgtaatgattccgacatcattaagtgctggttttgcagtgagtttaattccttatattacaaaaacatttgcagaaggtcgcttacatgaaatgcatcatcaaattagaacatctattggtgtattaatgtttataactgttccagctagtattggaattatggccttggcacaaccattattcacagttttctatggttacgatccaattgttttaggtcatgaccctaaccatgatggtagtcgcttattattctattatgcgcctgtagcaatactaatttcactattaagtgtaacggcatcaatgttacaaggtatagataaacagaaattaacagtttatgttattttagcttctgtagttatcaagttagcgttaaactatccattaattatgttattccatacacctggtgcaattttaagtactagtatcgcattattatttgcaattggatgtaatttctatattcttaaaaaatatgcgaagtttaaattcagctatagttggattcattttgcaaaaatattcttgtattcatttattatgatgctaggtgtagaattagtatttttccttgcaaatctattcttagaacctactaaacttggttacttaatcattattattttaggtgttacagtaggtattctaatttacggtacaatcacaattaaaacgcgtcttgcggacgaattcttaggtgaaattcctgaaaaattaagacgtagagttaggtttttacgatgagaatagataaatttttagcaaatatgggcgtcggtacacgcaatgaggtcaaacagttacttaaaaaaggccttgtaaatgtcaacgaacaagtaattaaatcaccaaaaacacatatagaaccagaaaacgataagataacagttcgtggagaattaatagaatacattgaaaatgtctatattatgttaaataagccaaaaggttatatatcagcaactgaagatcatcattcaaaaaccgttattgatttaatacctgaataccaacatctaaatatttttccggttggtcgtcttgataaagatacagaagggcttttattgataacgaatgatggtgattttaatcatgaattaatgagtccaaacaaacatgtttctaaaaaatatgaagttatttcagcaaatcctatcactgaagacgacattcaagcttttaaagagggtgtaacactgactgatggcaaggttaagcctgcaatattaacttatattgataatcaaacgtcacacgtaacaatttatgaaggaaaatatcatcaagttaaacgaatgtttcatagcattcaaaatgaggtattacatttaagacgtatcaaaattgctgatttagaattggacagcaatttagattcaggagaatatcgtttattaactgaaaatgattttgacaaattaaattataaataaaagggagacgattgatatggcaaaaggtaatttatttaaagcgattttaggtataggtggcgctgtagcagctgtacttgttacacgtaaagatagtcgtgacaagctgaaagcagaatataataaatataaacaagatcctcaaagctataaagataatgctaaggataaagcgacgcaattaggaacaattgctaatgaaacaattaaagaagtaaaaacaaatccgaaagaatatgctaatagattaaaaaataatccaaaagcatttttcgaagaagaaaaatcaaaatttaccgaatatgacaataagactgacgaaagtattgaaaaaggtaaatttgatgatgaaggtggcgcagcaccaaataataatttacgtatcgtcactgaagaagatttaaaaaagaataaaaatgcattatctgataaagaataa

SEQ ID NO: 111 - DNA, 1192 bp, Staphylococcus aureus
atagcaattgaatgtccagtaacaaatttggaggaagcgtatatgtatcaaacaattattatcggaggcggacctagcggcttaatggcggcagtagctgcaagcgaacaaagtagcagtgtgttactcattgaaaaaaagaaaggtctaggtcgtaaactcaaaatatctggtggcggtagatgtaacgtaactaatcgattaccatatgctgaaattattaagaacattcctggaaatgggaaatttttatatagtcccttttcaatttttgataatgaatccatcatagatttttttgagtctaggggtgttaaattaaaagaagaagatcacgggcgtatgtttccagtttccaacaaagcacaagacgtggttgatacattagtgacaactatcgaacgccaacatgtaacgattaaagaagaagaagctgttagtagaatcgaagttaatacagaccaaactttcactgtacatactcaaaataatagttatgaaagccattcgctagtgattgctacaggtggtacaagtgtccctcaaactggttcaactggtgatggttataagttcgcacaagatttaggtcataccattactgagttattcccgaccgaagttccaattacatcagctgaacctttcatcaaatccaatcgtctaaaaggtttaagtttaaaagatgttgaattgtcagtacttaagaaaaatggtaaaaaacgcatcagtcatcaaatggatatgttatttactcattttggtatcagtggtccagctgcattaagatgtagtcagtttgtttataaagaacaaaaaaatcaaaagacacagcacatttctatggcaatcgatgcatttcctgaattaaaccatgaacaattaaaacaacacatcacatcacttatcaaatcaacaattgaacgacttagtaaatatgtttaaagggtttgtatttaaggtaaacgggacattacctatagataaggcatttgtcacaggtggtggtgtgtcacttaaagaaattcaacctaaaacaatgatgtctaaattagttccgggattatttttatgtggtgaagtattagatatacatggttatactggtggttataatattacaagtgcactcgtaacaggacatgtcgctggattatatgccggtcattactcacatacatcaatggaataa

SEQ ID NO: 112 - DNA, 2748 bp, Staphylococcus aureus
ttgaattacaaccacaatcaaattgaaaagaaatggcaagactattgggacgaaaataaaacatttaaaacaaatgataacttaggtcaaaagaaattttatgctttagacatgtttccatatccatcaggtgctggtttacatgttggacatcctgagggctatacagcaacagatatcatttcaagatataaaaggatgcaaggttataatgtattacatccgatggggtgggatgcattcggattaccagcagagcaatatgctttagacactggcaacgacccacgtgaatttacaaagaaaaatatccaaacttttaaacgacaaattaaagaattagggttcagttatgattgggatcgtgaagttaatacaacagatccagaatactataaatggacacagtggattttcatacagttatataacaaaggtttagcatacgttgatgaagttgcagttaactggtgtccagcattaggcactgttttatctaacgaagaagtgattgatggtgtctctgaacgtggtggacatccagtttatcgtaagccgatgaaacaatgggtacttaaaatcacagaatatgcagatcaattattagcagatttagatgatttagattggcctgagtctttaaaagatatgcagcgcaattggattggacgttctgaaggggccaaagtttcatttgatgtagataatacggaaggaaaagtagaagtatttacgactagaccagacactatctatggtgcatcattcttagtcttaagtcctgaacatgcattagttaattcaattacaactgatgaatataaagaaaaagtaaaagcttatcaaacagaagcttctaaaaagtcagatttagaacgtacagatttagcaaaagataaatcaggtgtgtttactggtgcatatgcaattaatcctttatctggtgaaaaagtacaaatttggattgctgattatgtattatcaacatatggtactggagcaattatggcagtaccagcgcatgatgacagagattatgaatttgctaaaaagtttgatttgccaatcattgaagtcatcgaaggtggaaatgttgaagaagcagcatacactggtgaaggtaaacatattaattctggtgaacttgatggtttagaaaatgaagcggcaattactaaagctattcaattattagagcaaaaaggtgctggcgaaaagaaagttaattacaaattaagagattggttattcagtcgtcagcgttattggggcgaaccaattcctgtcattcattgggaagatggaacaatgacaactgttcctgaagaagagctaccattgttgttacctgaaacagatgaaatcaagccatcagggactggtgagtctccactagctaatattgattcatttgtaaatgttgtagatgaaaaaacaggtatgaaaggacgtcgtgaaacaaatacaatgccacaatgggcaggtagttgttggtattatttacgttacatcgatcctaaaaatgaaaatatgttagcagatcctgaaaaattaaaacattggttacctgttgatttatatatcggtggagtagaacatgcggttcttcacttattatatgcaagattttggcataaagtcctttatgatttgggtatcgtacctactaaagaacctttccaaaaattatttaaccaaggtatgattttaggagaaggtaatgagaagatgagtaaatctaaaggaaatgtaatcaatcctgatgatatagtacagtctcatggtgcagatactttacgtctttacgaaatgtttatgggacctttagatgctgcaattgcatggagtgaaaaaggattagatgggtctcgtcgattcttagatcgcgtatggcgtttaatggtaaatgaagatggaacattgagttcaaaaattgtaactacaaataataaatctttagataaagtttataaccaaactgttaaaaaggtaacagaagactttgaaacattaggatttaatactgctattagtcaattaatggtatttattaatgagtgttataaagttgatgaagtttataaaccttacattgaaggcttcgttaaaatgttagcacctattgcaccacatatcggtgaagaattatggtcaaaattaggacatgaagagtctattacgtaccaaccttggccaacttatgacgaagcactacttgtagatgatgaagtagaaatcgttgttcaagtaaatggtaaattgagagctaaaattaaaattgctaaagatacatcaaaagaagaaatgcaagaaattgccttatctaatgacaatgttaaagcgagtattgaaggtaaagacatcatgaaagtcatcgctgttcctcaaaaattagtcaatattgtagctaaataatgttttaaggaggactttgaaatgaagtcaattactacagatgaattaaaaaacaaactttttgaatctaaaccagttcaaattgttgatgttcgtactgacgaagaaacagcaatgggatatattcctaatgcaaagttgattccaatggataccattccggataatttaaattcatttaataaaaatgaaatatattatattgtatgtgctggtggagttcgaagcgctaaagttgtagaatatttagaggcaaatggcattgatgccgtaaatgtcgaaggcggcatgcacgcatggggcgatgaaggtttggaaataaaaagtatttaa

SEQ ID NO: 113 - DNA, 748 bp, Staphylococcus aureus
cgcgggatggagcagttcggtagctcgtcgggctcataacccgaaggtcggtggttcaaatccgcctcccgcaatacatagtttttaatttaataggtctcgtagtgtagcggttcacacgccctgccctgtcacgcaggatatcgcgggttcgattcccgtcgagaccgccattattattaccattacggttcagtagctcagttggtagagcaatggattgaagctccatgtgtcggcagttcgactctgtcctgaaccattcttaattcatggcggttgtggtgaagtggttaacacatcggattgtggttccgacattcgagggttcgatccccttcagccgccccataatcgtttacattagcgggtgtagtttaatggcaaaacctcagccttccaagctgatgttgtgggttcgattcccatcacccgctccattattttctattattattccacagtagctcagtggtagagctatcggctgttaaccgatcggtcgtaggttcgagtcctacctgtggagccatggctccttggtcaagcggttaagacaccgccctttcacggcggtaacacgggttcgagtcccgtaggagtcatacaaacagaagtgaaatatcgcttctgtttttttattacatatttattattgaggagagttgtccgagttggccgaaggagcacgcctggaaagtgtgtaggcgccacaagcgtctcgagggttcgaatccctcactctccg

SEQ ID NO: 114 - DNA, 155 bp, Staphylococcus aureus
ggctccttggtcaagcggttaagacaccgccctttcacggcggtaacacgggttcgagtcccgtaggagtcaccattttttaggtctcgtagtgtagcggttaacacgcctgcctgtcacgcaggagatcgcgggttcgattcccgtcgagaccg

SEQ ID NO: 115 - DNA, 197 bp, Staphylococcus aureus
gcgggagtagttcaacttttagaacacgttccttcccggaacgaggtataggtgtaaatcctatcttccgctccataattgcttccaaagggaagttttttgtttaccattaagccggtgtggcggaattggcagacgcgcgggactcaaaatcccgttccacttgtggagtgtcggttcgaccccgaccaccggta

SEQ ID NO: 116 - DNA, 7291 bp, Staphylococcus aureus
ttttatggagagtttgatcctggctcaggatgaacgctggcggcctgcctaatacatgcaagtcgagcgaacggacgagaagcttgcttctctgatgttagcggcggacgggtgagtaacacgtggataacctacctataagactgggataacttcgggaaaccggagctaataccggataatattttgaaccgcatggttcaaaagtgaaagacggtcttgctgtcacttatagatggatccgcgctgcattagctagttggtaaggtaacggcttaccaaggcaacgatgcatagccgacctgagagggtgatcggccacactggaactgagacacggtccagactcctacgggaggcagcagtagggaatcttccgcaatgggcgaaagcctgacggagcaacgccgcgtgagtgatgaaggtcttcggatcgtaaaactctgttattagggaagaacatatgtgtaagtaactgtgcacatcttgacggtacctaatcagaaagccacggctaactacgtgccagcagccgcggtaatacgtaggtggcaagcgttatccggaattattgggcgtaaagcgcgcgtaggcggttttttaagtctgatgtgaaagcccacggctcaaccgtggagggtcattggaaactggaaaacttgagtgcagaagaggaaagtggaattccatgtgtagcggtgaaatgcgcagagatatggaggaacaccagtggcgaaggcgactttctggtctgtaactgacgctgatgtgcgaaagcgtggggatcaaacaggattagataccctggtagtccacgccgtaaacgatgagtgctaagtgttagggggtttccgccccttagtgctgcagctaacgcattaagcactccgcctggggagtacgaccgcaaggttgaaactcaaaggaattgacggggacccgcacaagcggtggagcatgtggtttaattcgaagcaacgcgaagaaccttaccaaatcttgacatcctttgacaactctagagatagagctttccccttcgggggacaaagtgacaggtggtgcatggttgtcgtcagctcgtgtcgtgagatgttgggttaagtcccgcaacgagcgcaacccttaagcttagttgccatcattaagttgggcactctaagttgactgccggtgacaaaccggaggaaggtggggatgacgtcaaatcatcatgccccttatgatttgggctacacacgtgctacaatggacaatacaaagggcagcgaaaccgtgaggtcaagcaaatcccataaagttgttctcagttcggattgtagtctgcaactcgactacatgaagctggaatcgctagtaatcgtagatcagcatgctacggtgaatacgttcccgggtcttgtacacaccgcccgtcacaccacgagagtttgtaacacccgaagccggtggagtaaccttttaggagctagccgtcgaaggtgggacaaatgattggggtgaagtcgtaacaaggtagccgtatcggaaggtgcggctggatcacctcctttctaaggatatattcggaacatcttctgaagaagatgcggaataacgtgacatattgtattcagttttgaatgtttgttcattcaaattaatgggcctatagctcagctggttagagcgcacgcctgataagcgtgaggtcggtggttcgagtccacttaggcccaccattaatttaatacctatttgggggcttagctcagctgggagagcgcctgctttgcacgcaggaggtcagcggttcgatcccgctagtctccaccattatttgtacattgaaaactagataagtaagtaaaatatagattttaccaagcaaaaccgagtgaataaagagttttaaataagcttgaattcataagaaataatcgctagtgttcgaaagaacactcacaagattaataacgcgtttaaatctttttataaaagaacgtaatttcatgttaacgtttgacttataaaaatggtggaaacatagattaagttattaagggcgcacggtggatgccttggcactagaagccgatgaaggacgttactaacgacgatatgctttggggagctgtaagtaagctttgatccagagatttccgaatggggaaacccagcatgagttatgtcatgttatcgatatgtgaatacatagcatatcagaaggcacacccggagaactgaaacatcttagtacccggaggaagagaaagaaaattcgattcccttagtagcggcgagcgaaacgggaagagcccaaaccaacaagcttgcttgttggggttgtaggacactctgtacggagttacaaaggacgacattagacgaatcatctggaaagatgaatcaaagaaggtaataatcctgtagtcgaaaatgttgtctctcttgagtggatcctgagtacgacggagcacgtgaaattccgtcggaatctgggaggaccatctcctaaggctaaatactctctagtgaccgatagtgaaccagtaccgtgagggaaaggtgaaaagcaccccggaaggggagtgaaatagaacctgaaaccgtgtgcttacaagtagtcagagcccgttaatgggtgatggcgtgccttttgtagaatgaaccggcgagttacgatttgatgcaaggttaagcagtaaatgtggagccgtagcgaaagcgagtctgaatagggcgtttagtatttggtcgtagacccgaaaccaggtgatctacccttggtcaggttgaagttcaggtaacactgaatggaggaccgaaccgacttacgttgaaaagtgagcggatgaactgagggtagcggagaaattccaatcgaacctggagatagctggttctctccgaaatagctttagggctagcctcaagtgatgattattggaggtagagcactgtttggacgaggggcccctctcgggttaccgaattcagacaaactccgaatgccaattaatttaacttgggagtcagaacatgggtgataaggtccgtgttcgaaagggaaacagcccagaccaccagctaaggtcccaaaatatatgttaagtggaaaaggatgtggcgttgcccagacaactaggatgttggcttagaagcagccatcatttaaagagtgcgtaatagctcactagtcgagtgacactgcgccgaaaatgtaccggggctaaacatattaccgaagctgtggattgtcctttggacaatggtaggagagcgttctaagggcgttgaagcatgatcgtaaggacatgtggagcgcttagaagtgagaatgccggtgtgagtagcgaaagacgggtgagaatcccgtccaccgattgactaaggtttccagaggaaggctcgtccgctctgggttagtcgggtcctaagctgaggccgacaggcgtaggcgatggataacaggttgatattcctgtaccacctataatcgttttaatcgatggggggacgcagtaggataggcgaagcgtgcgattggattgcacgtctaagcagtaaggctgagtattaggcaaatccggtactcgttaaggctgagctgtgatggggagaagacattgtgtcttcgagtcgttgatttcacactgccgagaaaagcctctagatagaaaataggtgcccgtaccgcaaaccgacacaggtagtcaagatgagaattctaaggtgagcgagcgaactctcgttaaggaactcggcaaaatgaccccgtaacttcgggagaaggggtgctctttagggttaacgcccagaagagccgcagtgaataggcccaagcgactgtttatcaaaaacacaggtctctgctaaaccgtaaggtgatgtataggggctgacgcctgcccggtgctggaaggttaagaggagtggttagcttctgcgaagctacgaatcgaagccccagtaaacggcggccgtaactataacggtcctaaggtagcgaaattccttgtcgggtaagttccgacccgcacgaaaggcgtaacgatttgggcactgtctcaacgagagactcggtgaaatcatagtacctgtgaagatgcaggttacccgcgacaggacggaaagaccccgtggagctttactgtagcctgatattgaaattcggcacagcttgtacaggataggtaggagcctttgaaacgtgagcgctagcttacgtggaggcgctggtgggatactaccctagctgtgttggctttctaacccgcaccacttatcgtggtgggagacagtgtcaggcgggcagtttgactggggcggtcgcctcctaaaaggtaacggaggcgctcaaaggttccctcagaatggttggaaatcattcatagagtgtaaaggcataagggagcttgactgcgagacctacaagtcgagcagggtcgaaagacggacttagtgatccggtggttccgcatggaagggccatcgctcaacggataaaagctaccccggggataacaggcttatctcccccaagagttcacatcgacggggaggtttggcacctcgatgtcggctcatcgcatcctggggctgtagtcggtcccaagggttgggctgttcgcccattaaagcggtacgcgagctgggttcagaacgtcgtgagacagttcggtccctatccgtcgtgggcgtaggaaatttgagaggagctgtccttagtacgagaggaccgggatggacatacctctggtgtaccagttgtcgtgccaacggcatagctgggtagctatgtgtggacgggataagtgctgaaagcatctaagcatgaagcccccctcaagatgagatttcccaacttcggttataagatccctcaaagatgatgaggttaataggttcgaggtggaagcatggtgacatgtggagctgacgaatactaatcgatcgaagacttaatcaaaataaatgttttgcgaagcaaaatcacttttacttactatctagttttgaatgtataatttacattcatatgtctggtgactatagcaaggaggtcacacctgttcccatgccgaacacagaagttaagctccttagcgtcgatggtagtcgaacttacgttccgctagagtagaacgttgccaggcagttttaaatcggagaattagctcagctgggagagcatctgccttacaagcagagggtcggcggttcgaacccgtcattctccaccatttattcttacatattgccggcctagctcaattggtagagcaactgacttgtaatcagtaggttgggggttcaagtcctctggccggcaccatggaagagccattagctcagttggtagagcatctgacttttaatcagagggtcagaggttcgaatcctctatggctcaccatttgcgggtgtggcggaattggcagacgcactagacttaggatctagcgccttacggcgtgggggttcgactcccttcacccgcatatgcagaagtagttcagcggtagaatacaaccttgccaaggttggggtcgcgggttcgaatcccgtcttctgctccatttttatagtgccggggtggcggaactggcagacgcacaggacttaaaatcctgcggtgagtgatcaccgtaccggttcgattccggtcctcggcaccattttcaataaaaacatatgcgcccgtagctcaattggatagagcgtttgactacggatcaagaggttatgggttcgactcctatcgggcgcgttaattatacgggaagtagctcagcttggtagagcacttggtttgggaccaaggggtcgcaggttcgaatcctgtcttcccgatatactgtaattattatgggggcttagctcagctgggagagcgcctgctttgcacgcaggaggtcagcggttcgatcccgctagtctccaccatattatttacaaactatataaggcggtgtagctcagctggctagagcgtacggttcatacccgtgaggtcgggggttcgatcccctccaccgccactatttattagttgtaaaattatatttaggacctttagctcagttggttagagctaacggctcataaccgttcggtcgcaggttcgagtcctgcaaggtccatataattttggaggaatacccaagtccggctgaagggatcggtcttgaaaaccgacaggggcttaacggctcgcgggggttcgaatccctcttcctccgttttactaatggtctcgtagtgtagcggttaacacgcctgcctgtcacgcaggagatcgcgggttcgattcccgtcgagaccgccatttaattttataattaatagcgatttacctataataatggaggaatacccaagtccggctgaagggatcggtcttgaaaaccgacagggccttaacgggccgcgggggttcgaatccctcttcctccgccattattttttattatcgcgggatggagcagttcggtagctcgtcgggctcataacccgaaggtcggtggttcaaatccgcctcccgcaatacatagtttttaatttaataggtctcgtagtgtagcggttaacacgcctgcctgtcacgcaggagatcgcgggttcgattcccgtcgagaccgccatcattacatttttattatggttcagtagctcagttggtagagcaatggattgaagctccatgtgtcggcagttcgactctgtcctgaaccatttcttagccggcctagctcaattggtagagcaactgacttgtaatcagtaggttgggggttcaagtcctctggccggcaccatttatggaggggtagcgaagtggctaaacgcggcggactgtaaatccgctccttcgggttcggcagttcgaatctgcccccctccatttattatttttaataggggcatagttcaacggtagaatagaggtctccaaaacctttggtgtgggttcgattcctactgcccctgccatggcggctgtggtgaagtggttaacacatcggattgtggttccgacattcgagggttcgatccccttcagccgcccttattattaatgggctatagccaagcggtaaggcaacggactttgactccgtcactcgttggttcgaatccagctagcccagttattggcggcatagccaagtggtaaggcagaggtctgcaaaacctttatcaccggttcaaatccggttgccgcctccaggtttatgcgggagtagttcaacttttagaacacgttccttcccggaacgaggtataggtgcaaatcctatcttccgct

SEQ ID NO: 117 - DNA, 2047 bp, Staphylococcus aureus
atgagacagtggacggcaatccatctagcgaaattggcgcgtaaagcaagtagagcagtaggtaaaagaggaacagatttacctggacaaatcgctagaaaagtggatacagatgtattaagaaaattagcagagcaagttgatgatattgtatttatcagtggaacaaatggtaaaacaacgacttcaaacttaattggacatactttaaaagcaaataatattcaaattatacacaataatgaaggtgctaatatggctgcaggtataacttctgcattcatcatgcaatcaacacctaagactaaaattgcggtaatcgaaattgatgaaggttcgattccacgtgtgttaaaagaagttacaccttcaatgatggtatttactaatttctttagagatcaaatggatcgcttcggtgaaattgatattatggttaataacattgcagagacaattagtaataaaggcatcaaattattgctaaatgctgatgatccatttgtgagtcgtttgaaaatcgcaagtgatacgattgtgtactatggtatgaaagcacatgcccatgaatttgaacaaagtacgatgaatgaaagtagatattgtccaaactgtggtcgcttattgcaatacgattatattcattataatcaaattggtcattatcactgtcagtgtggtttcaaacgagagcaagcaaaatatgaaatatcaagttttgatgtggcaccgtttttatatttaaatatcaatgatgaaaaatatgatatgaaaattgcaggtgactttaacgcttataacgcgttagcagcatatactgttttaagagagctagggttaaatgaacaaacaattaaaaatggctttgaaacgtatacatcagacaatggtcgtatgcagtactttaaaaaagaacgaaaagaagcgatgatcaatttagctaaaaatcctgcaggaatgaatgcaagtttatcagttggtgaacaattagaaggcgaaaaagtgtatgttatttcgctaaatgataacgctgcagatggtcgagatacttcatggatttatgatgcagattttgaaaaattatctaagcaacaaattgaagctatcatcgtgacaggtacacgagcagaagaacttcaattgcgattgaagttagcagaggttgaagtaccaattatagttgagcgtgatatttataaagcaacggcaaagactatggattataaaggtttcacagttgcaataccaaactatacatcattagcgcctatgcttgaacaattaaaccgttcgtttgaaggaggtcaatcataatatgcatgaattgactatttatcattttatgtcagataaattgaatttatacagtgatataggaaatattattgctttaagacaacgtgctaaaaaacgaaatattaaagttaatgtcgtagaaatcaatgaaacagaaggtattacctttgatgaatgtgatattttctttatcggtggtggaagtgatagagaacaagcattagcaacaaaagaattaagtaaaattaagacaccacttaaagaagcgattgaagatggtatgccgggattaacaatttgtggaggctatcaatttttaggaaaaaaatatatcacgcctgatggtacagaattagaagggttaggtattttagatttttatactgaatcaaagacaaaccgattaacaggagatattgttatcgaaagtgatacttttggaactattgtaggttttgaaaatcacggtggtagaacatatcatgatttcggtacacttggtcatgttacttttggttatggtaataatgatgaagataaaaaagaaggcattcattataaaaatttattaggtacttatttacacggaccaattttacctaaaaattacgaaatcactgattatctgttagaaaaagcttgtgaacgtaaggggattccgtttgagcctaaagaaatagataatgaagcggaaatacaagcgaaacaagtattaatagacagagcaaatagacagaagaaatctcgttaa

SEQ ID NO: 118 - DNA, 2390 bp, Staphylococcus aureus
atgaggaaacgtgctagaatcatttataacccgacatcaggtaaagagctatttaaaagagaattacctgatgccttaataaaattagaaaaagcgggatatgaaacgagtgcatatgcaaccgagaaaataggtgatgccacacttgaagcagaaagagctatgcatgaaaattatgatgtattaatcgctgcaggtggtgatggaacattaaatgaagtagttaatggtatcgcagaaaagcctaatcgtcctaagctaggtgtcattcctatgggtactgttaatgactttggacgtgcattgcatatacctaatgacatcatgggggcacttgatgtcatcattgaaggtcattctactaaagtagatattggtaaaatgaataatcgatactttattaatttagctgcaggcggacaattgacgcaagtctcttatgaaacaccgagtaaattgaaatctattgttggtccatttgcttattacatcaaaggtttcgaaatgttacctcaaatgaaagctgtagatttaagaattgaatatgatggtaatgttttccaaggagaagcattattattctttttaggtttaacaaattcaatggcaggatttgaaaaattagtgccggacgctaagttagatgacggctattttacgttaattatagttgaaaaatcaaaccttgcagaacttggtcatattatgactttagcttcaagaggagaacatactaagcatcctaaagttatttatgaaaaagcaaaggcaattaatatttcatcattcacagacttacaactaaatgtagatggagaatatggtggtaaattaccagcgaatttcttaaatctagaacgtcatatagatgtctttgcacctaatgatattgtaaatgaagagttaataaataatgatcatgttgatgacaatttaatcgaagaataaacagaaatagtgaaatatataatggcaggttaggaagcgcataattttgttcctaacctgttcattttggaggtaaaattttgcaagcaatagctaaaaatgacataaaaacgggaacagttgttgatttaacgcatgaaggccatggtgttgtaaaaatagatcgctttcctattttcataccacaagctttaattaatgaacaaattgaatataaaattatcaaagtaaaaaagaactttgcgataggtaagttgcttaatataaatacgagaagtgagaatcgtgttgcaccgccatgtatatattatgaacgttgtggtgggtgccaacttcaacacttatcatacgaagcacaacttgaaatgaaaaaggaacaagtgattaatttgtttcagcgaaaagcgcattttgataattctaagattaacgatacagttggcatgacagatccttggagatatcgaaacaagtcccagattccagttggtaagaatgaacagaatgaagttattatgggcttttatcgtcaaagaagccatgacattattgacatggaaagttgtttaatacaagattcacaacatcaagaagtgatgaatgaagttaaatctattttaaaagatttaaatgtaagtatttatcaagaacaattgaaaaaaggtttaatgagacatttggttgtaagaacaggatatcatacagacgaaatgatgattatttttgtaactaatggtaaaaagtggccacaaaaaaatgctgttgttgagaagatattagatgcatttcctaatgtgacaagcattaaacaaaacattaatgatagccactctaatgttattatgggacgtcaatctataacgctatatggtaaagatacaattattgatcaattaacagatagtacatttaaaataagtgatcagtcattctaccaaattaattctgaacaaacagagaaattatataataaagcaattgagtatgcgcaattgacaggtaatgaagttgtattagatacctattgtggtattggaacaatagggctatatatggcaccacatgcaaaacatgtatacggtgttgaagtagtaccttcttcaattgaagacgcacaacaaaatgcgactataaaccaatgcaataatacaacttttgtctgtgggaaagctgaagaagttattttacaatggaaagcacaagggattaaaccagatgttgtaatggttgatccgccaagaaagggctgtgacgaaacgtttattcagactttgcttacattagaacctaagcgtattgtctatatttcatgtaatcccgcaacacagcaacgtgatgcattattattagctgaaaaatatcaacttgaagaggtaacaccggtagatatgtttccacaaacaacacatgttgagacagtggcattattcaatttgaaatag

SEQ ID NO: 119 - DNA, 3202 bp, Staphylococcus aureus
atgacaaaagtaacacgtgaagaagttgagcatatcgcgaatcttgcaagacttcaaatttctcctgaagaaacggaagaaatggccaacacattagaaagcattttagattttgcaaaacaaaatgatagcgctgatacagaaggcgttgaacctacatatcacgttttagatttacaaaacgttttacgtgaagataaagcaattaaaggtattccgcaagaattagctttgaaaaatgccaaagaaacagaagatggacaatttaaagtgcctacaatcatgaatgaggaggacgcgtaagatgagcattcgctacgaatcggttgagaatttattaactttaataaaagacaaaaaaatcaaaccatctgatgttgttaaagatatatatgatgcaattgaagagactgatccaacaattaagtcttttctagcgctggataaagaaaatgcaatcaaaaaagcgcaagaattggatgaattacaagcaaaagatcaaatggatggcaaattatttggtattccaatgggtataaaagataacattattacaaacggattagaaacaacatgtgcaagtaaaatgttagaaggttttgtgccaatttacgaatctactgtaatggaaaaactacataaagagaatgccgttttaatcggtaaattaaatatggatgagtttgcaatgggtggttcaacagaaacatcttatttcaaaaaaacagttaacccatttgaccataaagcagtaccaggtggttcatcaggtggatctgcagcagcagttgcagctggcttagtaccacttagcttaggttcagacacaggtggttcaattagacaaccggctgcatattgtggcgttgtcggtatgaaaccaacatacggtcgtgtatctcgatttggattagttgcttttgcatcttcattagaccaaattggtccattgactcgaaatgtaaaagataatgcaatcgtattagaagctatttctggtgcagatgttaatgactctacaagtgcaccagttgatgatgtagactttacatctgaaattggtaaagatattaaaggattaaaagttgcattacctaaagaatacttaggtgaaggtgtagctgatgacgtaaaagaagcagttcaaaacgctgtagaaactttaaaatctttaggtgctgtcgttgaggaagtatcattgccaaatactaaatttggtattccatcatattacgtgattgcatcatcagaagcttcgtcaaacctttctcgttttgacggaattcgttatggttatcattctaaagaagctcattcattagaagaattatataaaatgtcaagatctgaaggtttcggtaaagaagtaaaacgtcgtattttcttaggtacatttgcattaagttcaggttactacgatgcttactataaaaaatctcaaaaagttagaacattgattaaaaatgactttgataaagtattcgaaaattatgatgtagtagttggtccaacagcgcctacaactgcgtttaatttaggtgaagaaattgatgatccattaacaatgtatgccaatgatttattaacaacaccagtaaacttagctggattacctggtatttctgttccttgtggacaatcaaatggccgaccaatcggtttacagttcattggtaaaccattcgatgaaaaaacgttatatcgtgtcgcttatcaatatgaaacacaatacaatttacatgacgtttatgaaaaattataaggagtggaaatcatgcattttgaaacagttataggacttgaagttcacgtagagttaaaaacggactcaaaaatgttttctccatcaccagcgcattttggagcagaacctaactcaaatacaaatgttatcgacttagcatatccaggtgtcttaccagttgttaataagcgtgcagtagactgggcaatgcgtgctgcaatggcactaaatatggaaatcgcaacagaatctaagtttgaccgtaagaactatttctatccagataatccaaaagcatatcaaatttctcaatttgatcaaccaattggtgaaaatggatatatcgatatcgaagtcgacggtgaaacaaaacgaatcggtattactcgtcttcacatggaagaagatgctggtaagtcaacacataaaggtgagtattcattagttgacttgaaccgtcaaggtacaccgctaattgaaatcgtatctgaaccagatattcgttcacctaaagaagcatatgcatatttagaaaaattacgttcaattattcaatacactggtgtatcagacgttaagatggaagagggatctttacgttgtgatgctaacatctctttgcgtccatatggtcaagaaaaatttggtactaaagccgaattgaaaaacttaaactcatttaactatgtacgtaaaggtttagaatatgaagaaaaacgccaagaagaagaattgttaaatggtggagaaatcggacaagaaacacgtcgatttgatgaatctacaggtaaaacaattttaatgcgtgttaaagaaggttctgatgattaccgttacttcccagagcctgacattgtacctttatatattgatgatgcttggaaagagcgtgttcgtcagacaattcctgaattaccagatgagcgtaaggctaagtatgtaaatgaattaggtttacctgcatacgatgcacacgtattaacattgactaaagaaatgtcagatttctttgaatcaacaattgaacacggtgcagatgttaaattaacatctaactggttaatgggtggcgtaaacgaatatttaaataaaaatcaagtagaattattagatactaaattaacaccagaaaatttagcaggtatgattaaacttatcgaagacggaacaatgagcagtaaaattgcgaagaaagtcttcccagagttagcagctaaaggtggtaatgctaaacagattatggaagataatggcttagttcaaatttctgatgaagcaacacttctaaaatttgtaaatgaagcattagacaataacgaacaatcagttgaagattacaaaaatggtaaaggcaaagctatgggcttcttagttggtcaaattatgaaagcgtctaaaggtcaagctaatccacaattagtaaatcaactattaaaacaagaattagataaaagataa

SEQ ID NO: 120 - DNA, 6101 bp, Staphylococcus aureus
atgtatgacattaaaaaatggcgccatatttttaaattagacccagctaaacatatttcagatgatgatttagatgcgatttgtatgtctcaaacagatgcaattatgattggtggaactgatgacgttactgaagataatgtcattcatttaatgagcaaaataagaagatacccattgcctttagtacttgaaatatcaaatatcgaaagtgtaatgcctggttttgatttttattttgtacctacagtactgaacagtacagatgttgcatttcacaatggtacattattagaagcgcttaaaacatatggacatagtatagattttgaagaagtaatatttgaagggtatgtcgtgtgcaatgctgatagcaaagtggcaaaacataccaaagcaaatacagatttaacaacagaagatttagaagcatatgcccaaatggtcaatcatatgtatcgattaccggttatgtatatagagtatagtggcatttatggcgacgtatcaaaggttcaagctgtctcagaacatctaacagaaacgcaacttttttatggtggcggtatttcctcagaacaacaagcgacagagatggcagctattgcagatacaattatcgtcggtgatattatttataaagatattaaaaaagctttaaaaacagtaaaaataaaggagtctagtaaatgaatgcgttattaaatcatatgaatacagagcaaagtgaagctgtaaagacaacagaaggaccattgttaattatggcaggtgctggttcagggaagacacgtgttttaacacatagaattgcttatttattagacgaaaaagatgtctcaccatacaatgttttggctattacttttacaaataaagctgcaagagaaatgaaagaacgtgttcaaaaattagtaggtgatcaagcagaagttatttggatgtcaacattccactcaatgtgtgttcgtattttacgtcgtgatgcagatcgaataggtatagaacgcaattttacgataattgatcctacagaccaaaaatctgttattaaagacgtcttaaaaaatgaaaatattgatagtaaaaagtttgaacctcgtatgtttatcggtgcgatcagtaatttgaaaaatgaacttaaaacacctgcagatgctcaaaaagaagccacagattatcactcgcaaatggtagcaacggtttatagtggatatcaacgccaattgtcgcgtaatgaagcgttagattttgatgaccttattatgacaacgattaacttatttgagcgtgtaccagaagttctagaatattatcagaacaaattccaatatattcatgtagatgagtatcaagatactaataaagcacaatatacattagttaaattattagcaagtaagtttaaaaacttatgtgttgtaggtgactcagatcagtcaatttatggttggcgtggtgctgatattcaaaatatcttatcatttgaaaaagactacccagaagcgaatacaatctttttagagcaaaattatcgttcgacgaaaacgattttaaatgcggctaacgaagtgattaaaaataattctgaacgtaagccaaaaggactgtggactgcaaatacgaatggtgagaaaattcattactatgaagcaatgacagaacgtgatgaagcggaatttgtaatacgagaaattatgaagcatcaacgtaatggtaagaaatatcaagatatggcaattttatatagaacaaatgcacaatcacgtgtacttgaggaaacattcatgaaatctaatatgccatacacaatggttggtggccaaaagttctatgaccgtaaagaaatcaaagatttattaagttatttgcgtataattgccaatagtaatgatgacattagtttgcaacgtattattaatgttccaaaaagaggtgtaggtccttcatctgttgaaaaagttcaaaactatgcacttcaaaacaatatcagtatgtttgatgcacttggagaagctgattttatcggattgtcaaaaaaggtgacacaagagtgtcttaatttttacgagttaatccaaagcttgataaaagaacaagaatttttagaaattcatgaaatagttgatgaagtattacaaaagtctggctaccgagaaatgcttgaacgtgaaaatacactagaatctcgaagtagattagaaaacatcgatgaatttatgtcagtaccaaaagactatgaggaaaataccccattagaagaacagtcattaattaactttttaacggatttatcgttagtagctgatattgatgaggcagatactgaaaatggcgtaacactaatgacgatgcactcggctaagggccttgaatttccaatcgtctttataatggggatggaagaatctttattcccacatattagagcgattaagagtgaagatgatcacgaaatgcaagaagaacgtcgtatttgttatgtagcaattacaagggctgaagaggtgttatatatcactcatgcgacatcaagaatgttatttggtcgccctcagtcgaatatgccatctagatttttaaaggaaattccagaatcactattagaaaatcattcaagtggcaaacgacaaacgatacaacctaaggcaaaaccttttgctaaacgcggatttagtcaacgaacaacgtcaacgaaaaaacaagtatcgtcatctgattggaatgtaggtgacaaagtgatgcataaagcctggggagaaggcatggtgagtaatgtaaacgagaaaaatggctcaatcgaactagatattatctttaaatcacaagggccaaaacgtttgttagcgcaatttgcaccaattgaaaaaaaggaggattaagggatggctgatttatcgtctcgtgtgaacgagttacatgatttattaaatcaatacagttatgaatactatgtagaggataatccatctgtaccagatagtgaatatgacaaattacttcatgaactgattaaaatagaagaggagcatcctgagtataagactgtagattctccaacagttagagttggcggtgaagcccaagcctctttcaaaaaagtcaaccatgacacgccaatgttaagtttagggaatgcatttaatgaggatgatttgagaaaattcgaccaacgcatacgtgaacaaattggcaacgttgaatatatgtgcgaattaaaaattgatggcttagcagtatcattgaaatatgttgatggatacttcgttcaaggtttaacacgtggtgatggaacaacaggtgaagatattaccgaaaatttaaaaacaattcatgcgatacctttgaaaatgaaagaaccattaaatgtagaagttcgtggtgaagcatatatgccgagacgttcatttttacgattaaatgaagaaaaagaaaaaaatgatgagcagttatttgcaaatccaagaaacgctgctgcgggatcattaagacagttagattctaaattaacggcaaaacgaaagctaagcgtatttatatatagtgtcaatgatttcactgatttcaatgcgcgttcgcaaagtgaagcattagatgagttagataaattaggttttacaacgaataaaaatagagcgcgtgtaaataatatcgatggtgttttagagtatattgaaaaatggacaagccaaagagagtcattaccttatgatattgatgggattgttattaaggttaatgatttagatcaacaggatgagatgggattcacacaaaaatctcctagatgggccattgcttataaatttccagctgaggaagtagtaactaaattattagatattgaattaagtattggacgaacaggtgtagtcacacctactgctattttagaaccagtaaaagtagctggtacaactgtatcaagagcatctttgcacaatgaggatttaattcatgacagagatattcgaattggtgatagtgttgtagtgaaaaaagcaggtgacatcatacctgaagttgtacgtagtattccagaacgtagacctgaggatgctgtcacatatcatatgccaacccattgtccaagttgtggacatgaattagtacgtattgaaggcgaagtagcacttcgttgcattaatccaaaatgccaagcacaacttgttgaaggattaattcactttgtatcaagacaagccatgaatattgatggtttaggcactaaaattattcaacagctttatcaaagcgaattaattaaagatgttgctgatattttctatttaacagaagaagatttattacctttagatagaatggggcagaaaaaagttgataatttattagctgccattcaacaagctaaggacaactctttagaaaatttattatttggtctaggtattaggcatttaggtgttaaagcgagccaagtgttagcagaaaaatatgaaacgatagatcgattactaacggtaactgaagcggaattagtagaaattcatgatataggtgataaagtagcacaatctgtagttacttatttagaaaatgaagatattcgtgctttaattcaaaaattaaaagataaacatgttaatatgatttataaaggtatcaaaacatcagatattgaaggacatcctgaatttagtggtaaaacgatagtactgactggtaagctacatcaaatgacacgcaatgaagcatctaaatggcttgcatcacaaggtgctaaagttacaagtagcgttactaaaaatacagatgtcgttattgctggtgaagatgcaggttcaaaattaacaaaagcacaaagtttaggtattgaaatttggacagagcaacaatttgtagataagcaaaatgaattaaatagttagaggggtatgtcgatgaagcgtacattagtattattgattacagctatctttatactcgctgcttgtggtaaccataaggatgaccaggctggaaaagataatcaaaaacataacaatagttcaaatcaagtaaaagaaattgctacggataaaaatgtacaaggtgataactatcgtacattgttaccatttaaagaaagccaggcaagaggacttttacaagataacatggcaaatagttataatggcggcgactttgaagatggtttattgaacttaagtaaagaagtatttccaacagataaatatttgtatcaagatggtcaatttttggacaagaaaacaattaatgcctatttaaatcctaagtatacaaaacgtgaaatcgataagatgtctgaaaaagataaaaaagacaagaaagcgaatgaaaatttaggacttaatccatcacacgaaggtgaaacaaatcctgaaaagattgcagaaaaatcaccagcctatttatctaacattttagagcaagatttttatggtggtggagatacaaaaggtaagaatattaaaggtatgacgattggtttagctatgaatagtgtttattactataaaaaagaaaaagatggaccgacttttagtaaaaaactagatgatagcgaagttaaaaagcaaggtaaacaaatggctagtgagatattatcaaggttacgtgaaaatgatgatttaaaagatataccaattcattttgcaatttataagcaatcaagtgaagattcaatcacaccaggtgaatttatcactcaagcgactgcagaaaagagtcaaacaaagcttaatgaatggcataatatcaatgaaaaatcagctttattaccttcttcaacagcagcagattatgatgaaaatttaaataataatttcaagcaatttaatgataatttgcaatcatatttttctaatttcacacaagcagtagggaaagttaaatttgttgataaaaagccacaacgattagtagtagatttaccaatcgattactatggacaagctgaaacaattggtattacacagtacgttactgaacaagcgaataaatatttcgataaaatcgataactatgaaattcgtattaaagatggtaaccaaccacgtgctttaattagtaagacaaaagatgacaaagaaccgcaagttcatatttacagtaattaa

SEQ ID NO: 121 - DNA, 2284 bp, Staphylococcus aureus
gtgtaccaattagaagacgacagtttaatgttacataatgacttatatcaaataaatatggctgaaagttattggaatgataatattcatgaaaaaatggctgtatttgatttgtattttagaaaaatgccatttaatagtggctatgctgtttttaatggtttaaaacgcgtcattgattttatagaacattttggattttcagaatctgatttggaatatttaaagtctattggctacaaggatgatttcttatcatatttaaaagatttaaaattcacaggaagcattcgttcgatgcaagaaggcgaattatgctttggtaacgaaccattgttacgcgtagaagcaccattgattcaagcgcaattaatagaaacaattttattaaacattgtaaatttccatacactaattacaacaaaggctagtagaattcgtcaaattgcatcaaatgataaattaatggagtttggtacacgtcgtgcgcaagaaattgatgcagcattgtggggcgctagagctgcttacatcgggggctttgattctacaagtaatgttagggcaggtaaattatttggtatacctgtgtctggtacacatgcacacgcatttgtccaaacttatggagatgaatatgttgccttcaaaaaatatgctgaaagacataaaaattgtgtgttcctagtagatacattccatactttaaaatctggcgtgccaaatgcaataaaagttgcaaaagaattaggtgacaaaattaactttgtaggtattcgattggattctggagatatcgcttatttatctaaagaggcaagacgtatgcttgatgaagcaggatttactgaaactaaaattatcgcgtctaatgatttggatgaagaaacgattacgagtttgaaagcacaaggtgcaaaagtagattcttggggcgttggtacaaagctgattacaggatacgatcaaccagcattaggtgcagtatataaacttgtagctattgaaaatgaagagggttcatatagtgatcgtattaaattatcaaataacgctgaaaaggttacgacgccaggtaagaaaaatgtatatcgcattataaacaagaaaacaggtaaggcagaaggcgattatattactttggaaaatgaaaatccatacgatgaacaacctttaaaattattccatccagtgcatacttataaaatgaaatttataaaatctttcgaagccattgatttgcatcataatatttatgaaaatggtaaattagtatatcaaatgccaacagaagatgaatcacgtgaatatttagcacaaggattacaatctatttgggatgaaaataagcgtttccttaatccacaagaatatccagtcgatttaagcaaggcatgttgggataataaacataaacgtatttttgaagttgcggaacacgttaaggagatggaagaagataatgagtaaattacaagacgttattgtacaagaaatgaaagtgaaaaagcgtatcgatagtgctgaagaaattatggaattaaagcaatttataaaaaattatgtacaatcacattcatttataaaatctttagtgttaggtatttcaggaggacaagattctacattagttggaaaactagtacaaatgtctgttaacgaattacgtgaagaaggcattgattgtacgtttattgcagttaaattaccttatggagttcaaaaagatgctgatgaagttgaccaagctttgcgattcattgaaccagatgaaatagtaacagtcaatattaagcctgcagttgatcaaagtgtgcaatcattaaaagaagctggtattgttcttacagatttccaaaaaggaaatgaaaaagcgcgtgaacgtatgaaagtacaattttcaattgcttcaaaccgacaaggtattgtagtaggaacagatcattcagctgaaaatataactgggttttatacgaagtacggtgatggtgctgcagatatcgcacctatatttggtttgaataaacgacaaggtcgtcaattattagcgtatcttggtgcgccaaaggaattatatgaaaaaacgccaactgctgatttagaagatgataaaccacagcttccagatgaagatgcattaggtgtaacttatgaggcgattgataattatttagaaggtaagccagttacgccagaagaacaaaaagtaattgaaaatcattatatacgaaatgcacacaaacgtgaacttgcatatacaagatacacgtggccaaaatcctaa

SEQ ID NO: 122 - DNA, 1543 bp, Staphylococcus aureus
atgacacatcgcgcactattagttgttgactattcatatgactttatcgcagatgacggcttactaacatgcggtaaacctggacaaaatattgaagattttattgtttctcgtatcaatgactttaattattatcaagaccatatattctttttaatggatttacattatttacatgacattcatcatcctgaaagtaaattattcccaccacacaatatcgtagatacaagtggtagagaattatacggtaaagtaggtaaattatacgaaacaattaaagcgcaacctaatgtacatttcattgataaaacgcgctatgattcgttctttggtaccccgcttgatagtttattgagagaaagaagtattaatcaagtcgaaatcgttggtgtatgtaccgatatttgcgtgttacatacagcaatttctgcatacaacttaggttataaaatttcagtacctgctgagggagtggcttcatttaatcaaaaagggcatgaatgggcacttgcacatttcaaaaactcattaggtgcagaggtagaacaacacgtttaaatcgtgctaaaataattataaagaatacaatttacaagggagatatttgacaatggctaaaacatatattttcggacataagaatccagacactgatgcaatttcatctgcgattattatggcagaatttgaacaacttagaggtaattcaggagccaaagcataccgtttaggtgatgtgagtgcagaaactcaattcgcgttagatacatttaatgtacctgctccggaattattaacggatgatttagatggtcaagatgttatcttagttgatcataacgaattccaacaaagttctgatacgattgcctctgctacaattaagcatgtaattgatcatcacagaattgcaaatttcgaaactgctggccctttatgttatcgtgctgaaccagttggttgtacagctacaattttatacaaaatgtttagagaacgtggctttgaaattaaacctgaaattgccggtttaatgttatcagcaattatctcagatagcttacttttcaaatcaccaacatgtacacaacaagacgttaaagcagctgaagaattaaaagatattgctaaagttgatattcaaaagtacggcttagatatgttaaaagcaggtgcttcaacaactgataaatcagttgaattcttattaaacatggatgctaaatcatttactatgggtgactatgtgactcgtattgcacaagttaatgctgttgaccttgacgaagtgttaaatcgtaaagaagatttagaaaaagaaatgttagctgtaagtgcacaagaaaaatatgacttatttgtacttgttgttactgacatcattaatagtgattctaaaattttagttgtaggtgctgaaaaagataaagtcggcgaagcattcaatgttcaattagaagatgacatggccttcttatctggtgttgtttctcgaaaaaaacaaatcgtacctcaaatcactgaagcattaacaaaataa

SEQ ID NO: 123 - DNA, 1977 bp, Staphylococcus aureus
atgctaaaaccaattggaaatcgtgtgattattgagaaaaaagaacaagaacaaacaactaaaagtggtattgttttaactgatagtgctaaagaaaaatcaaacgaaggcgttatcgttgcagtaggaactggacgtctattaaatgatggtacaagagtgactcctgaagtgaaagaaggggaccgtgtcgtgttccaacaatatgctggtacagaagttaaacgagataatgaaacatatctagtattaaatgaagaagatattttagcggtaattgaataatataaaattaaattcatagataaattgtaaagaacgaaaatgaaatatgactaaacaaatggaggtttatcatttatggttaaacaattgaaattctctgaagatgcacgtcaagcaatgttacgtggtgtagaccaattagcaaatgcagttaaagtaacgattggtcctaaaggacgtaatgttgtattagataaagagtttacagcacctttaattacgaacgatggtgtaacgattgctaaagaaatcgaattagaagatccatatgaaaatatgggggctaaactagttcaagaagttgcaaataagacaaatgaaattgctggtgacggtacgacaactgcaacagtattagctcaagcaatgattcaagaaggcttgaaaaatgttacaagtggtgcgaacccagttggtttacgtcaaggtatcgacaaagcagttaaagttgctgtagaagcattacatgaaaattctcaaaaagttgaaaataaaaatgaaatagcgcaagtaggtgcgatttcagcagcagatgaagaaattggacgttatatttctgaagctatggaaaaagtaggtaacgatggtgtcattacaattgaagaatcaaatggactaaacactgaactagaagtggttgaaggtatgcaatttgatcgtggttatcaatcaccatatatggttactgattcagataaaatggttgctgaattagaacgcccatacattttagtaacagataagaaaatctcgtctttccaagatatcttacctttattagaacaagtggttcaatctaatcgtccaatcttaattgtagctgatgaagttgaaggcgatgcattaacaaatatcgtgctaaaccgaatgcgtggcacatttacagctgttgcagtaaaggcgcctggtttcggtgatcgtcgtaaagcaatgttagaagatttagctattttaactggtgcgcaagtgattactgatgatttaggcttagatttaaaagatgcatcaattgatatgttaggtactgcaagtaaagtagaagtaactaaagataataccactgttgttgatggtgacggtgacgaaaacagcattgatgcacgtgtaagccaattgaaatctcaaattgaagaaactgaatctgactttgatcgtgaaaaattacaagagcgcttagctaaattagcaggtggtgttgcagttattaaagtaggtgcagcaagtgaaacagagcttaaagaacgtaaattacgtattgaagatgcattaaattctacacgtgcagcagttgaagaaggtattgttgcaggtggtggtactgcattagtaaatgtttaccaaaaagtaagtgaaattgaagcagaaggtgacattgaaacaggtgtaaatattgtacttaaagcactaactgcaccagttcgtcaaattgctgaaaatgcaggattagaaggttctgttattgtagaacgtttgaaaaacgcagagccgggtgttggttttaacgctgctacaaacgagtgggttaatatgttagaagcaggtatcgttgatccaactaaagtaacacgctcagcattacaacatgctgcaagtgttgcagcaatgttcttaacgactgaagcggttgtagcatcaattccagaaaaaaataatgaccaacctaacatgggtggcatgccgggaatgatgtaa

SEQ ID NO: 124 - DNA, 175 bp, Staphylococcus aureus
gcggtcgtggcggaatggcagacgcgctaggttgagggcctagtgggagaaatcccgtggaggttcaagtcctctcggccgcatcaaaattcttaattaaataagcgggtgtagtttaatggcaaaacctcagccttccaagctgatgttgtgggttcgattcccatcacccgct

SEQ ID NO: 125 - DNA, 4725 bp, Staphylococcus aureus
atgtcagattatactaagttgactaagagtcctaagtcagcattgttgtattactacattacgaatggcttagaatttatattgagtgtagctgtgtatgtcattttttattttatatggttaagatttgaatggccacattacttactttatattttgttggttttaggtgctctgagtacattaaaattatttattaagcctttatggcaatatcattgtcgcttttataaagttgatcaactaagtgtacaatatcgtacatcattttttatatataaagaagaaacgagtcgaattgaacgtttacaatacttgtcgattaaatctaatccaattagtaaagtgcttaatttgtataaagttggatttatgactgcaggtcatactatttatttaccgatgatgtctcatgacgatgttaaaataatcgaagcgagaactatgtcgaatttgagaggggttgaaagtgatgtctgaacctcaaaaattacatccgatttcatattttaatggcataatcaatgctatcaaacaaaacatagtcgtcttttttattttcattatctttcaattgaaagattttgattatacgaatcccgaatcatatttatggataggtattgtatttgtattctttttaatatcatacatttctcaaattgtcggaattatgaacacgcgatattggattgaggataattatttcattttaacaacaggtatttttaataaaaagcgtaaagaattaaatataaaacgtattcagtccgttgatatgacacaaggggtcgtcaatcaaattattggtggtgtggatttacaaatcaaaacaccaagtgatggtattgtcttaagtgttatttcgaaaaaacaaggtgaatatcttgaacgatatattgatcaattgcaaacagagttgaagacagaagtggcgcaaaagtctagtgctgagaagaatgacaactgtaatcatgacattgaaggtaatgtggaagacatcgcagaaggtcgcttagatgaagtgcagaacactgatagtatgcttaatcagaaaaataaacgcattcctatatatcagatgaattttaaagaatcactatttatggcaatgaccagtggcgccattggtgtaacgttagcagctttagtaccgatttacggggctgtaagagagttgatcccatggtcgaagctaaatcatgaaattagtcaatgggttcaaattgtaagtatttcagtattaatcatcattttactagtattaatagtggcatatattattggaacgattataacaatgataagattttatggcttttcggtgatgcttgaaaatgagcaacttaaaattgaatatggtctctttaacaagaagaaagtaactgtaccaacgaaacgattgcaagctgttgttgaacgtcagtcatatatacgaagattatttggctacacagcaatacattttatcatcacaagtgattttgaaaataaaaaaatcgaagatgatgacaatgattcaggtagtgtgccgatattgccgtttattaaacgagacaaagcatatcaaattatccagaatttagtaccagatttatcttatcaacaagttaatgaaggtatgcctttgtcaggtttccacagacactttttaatacctagtattattgtcatagctatggcaggtattggctgttatttttggaatcaattattattgttatttacgattataacaatagtcattattggtttatttgtgatcaaaggatatctttatgtcaaacatgcgggttttaaaatgacagaagaacaaattactatccagaatttcgagctattgaaacgaaatatttattattttaaagcgcatcacattataggatttgacacttggcaacatacattacttaaacgcaacaatttaaataattttagctttattgttgctaaaggtgtgggagcccaatcgattaacctaaaatacgcaagaagtgaagatgcaaataaattgaaatcatggtatttaagaggtgaaaatgatgagggattataattttatgtcaccacacgctaaaaaagtgatgaggttaagtgctgtgctgttttggatacccatagcgcttgtacttttaatcgcatttaatattttgaactggctattttgggagatattagataacaatatatccattgttagtagtgtgattataatattacttgttgctgttttcacgcttgtcatagcgccagtatatcgatataagcactgcagatatgcatttgaaaaacaccatttgcgtgtacgaaacggcattttatttttggatgaaaaagtaataccatattttcgtattcaaaatattgatatcgatgttggtcctataatgagacgctatcgattagcaactttgaccctttatacagcgggtggtcaagctgaaattgaattaatagatagaagtgaagcacgtagattgaaacgatggttaaataacgagagacatttagaaaacaataaaaatgaggaataatcaatgatacatggaattggtgtagatttaatcgaaatcgatcgaataaaagtgttatatagtaagcagccaaaattggttgagcggattttaactaaaaatgaacagcacaaattcaacaatttcacacatgagcaacgtaaaattgaatttttagctggcaggtttgctacaaaagaagcgttcagtaaagcattaggcacaggcttaggaaaacatgtagcttttaacgatatagactgttacaacgacgaacttggcaaaccaaagattgattacgaagggttcatcgtacatgttagtatctcacacactgagcattatgcgatgagccaagttgttttagaaaagtcagcattttaaatttgttatacaatgataattaagatctagttttaaaacgtgtgggaattacaggaggaagtaatatgtcggataaatattatagatctgcgtatatgaatgtagatttaaacgctgttgcatcaaatttcaaagtattcagtacattgcatccaaataaaacagtgatggctgtcgttaaagccaatgcctatggactaggtagtgttaaagtagcacgtcatttaatggaaaatggcgccacattttttgctgtagcaacgttagatgaagcgatagaacttagaatgcatgggattactgctaaaattttagtcttaggtgtgttaccagctaaagatattgataaagcgatacaacacagagttgccttaacggttccgtctaaacagtggttgaaagaagcaattaaaaacatttctggtgagcaagagaaaaagttatggttgcacattaaattagatacaggaatgggacgtttaggtattaaagatactaatacgtatcaagaagtgattgaaatcattcaacaatatgagcaacttgtatttgaaggcgtgtttacacactttgcctgtgctgacgaaccaggagatatgacaactgaacaatatcaacgttttaaagatatggtcaatgaagcaattaaacctgaatatatacattgtcagaactcagcaggctctctattaatggattgccaattctgtaatgcaataagaccaggaatttccctttatggatattatccatcagagtatgtacagcaaaaagttaaagtacaccttaaaccaagtgtgcaattaattgctaatgtagttcaaacaaagacgctacaagcgggtgagtctgtaagttatggtgcaacttatacagctactgacccaactacaatagctttgttacctattggatatgcagatggctatttacgcataatgcaaggtagctttgtaaatgtaaatggtcatcaatgcgaagttattggtcgcgtatgtatggatcagacaattgttaaagtgccagatcaagttaaagctggagattcggtgattttaatagataatcatagagaaagtccacagtcggtagaggtggtagctgaaaagcaacatactattaattatgaagtgctttgtaacttgtcgagacgtttgccgcgaatctatcatgatggtgatcaacgttttgtaacaaatgaattgttaaaataatatggtcagtgcatataaaatttgttatcattagagtaattaaaggtcatttaataacttttggaatcaattggaggttctcatatgttatcttttagtcaaaatagaagtcatagcttagaacaatctttaaaagaaggatattcacaaatggctgatttaaatctctccctagcgaacgaagcttttccgatagagtgtgaagcatgcgattgcaacgaaacatatttatcttctaattcaacgaatgaatgattagacgaggagatgtttatttagcagatttatcaccagtacagggatctgaacaagggggagtcagacctgtagtcataattcaaaatgatactggtaataaatatagtcctacagttattgttgcggcaataactggtaggattaataaagcgaaaataccgacacatgtagagattgaaaagaaaaagtataaattggataaagactcagttatattattagaacaaattcgtacacttgataaaaaacgattgaaagaaaaactgacgtacttatccgatgataaaatgaaagaagtagataatgcactaatgattagtttagggctgaatgcagtagctcaccagaaaaattag

SEQ ID NO: 126 - DNA, 2444 bp, Staphylococcus aureus
atgacaaaagaaaatatttgtatcgtttttggagggaaaagtgcagaacacgaagtatcgattctgacagcacaaaatgtattaaatgcaatagataaagacaaatatcatgttgatatcatttatattaccaatgatggtgattggagaaagcaaaataatattacagctgaaattaaatctactgatgagcttcatttagaaaatggagaggcgcttgagatttcacagctattgaaagaaagtagttcaggacaaccatacgatgcagtattcccattattacatggtcctaatggtgaagatggcacgattcaagggctttttgaagttttggatgtaccatatgtaggaaatggtgtattgtcagctgcaagttctatggacaaacttgtaatgaaacaattatttgaacatcgagggttaccacagttaccttatattagtttcttacgttctgaatatgaaaaatatgaacataacattttaaaattagtaaatgataaattaaattacccagtctttgttaaacctgctaacttagggtcaagtgtaggtatcagtaaatgtaataatgaagcggaacttaaagaaggtattaaagaagcattccaatttgaccgtaagcttgttatagaacaaggcgttaacgcacgtgaaattgaagtagcagttttaggaaatgactatcctgaagcgacatggccaggtgaagtcgtaaaagatgtcgcgttttacgattacaaatcaaaatataaagatggtaaggttcaattacaaattccagctgacttagacgaagatgttcaattaacgcttagaaatatggcattagaggcattcaaagcgacagattgttctggtttagtccgtgctgatttctttgtaacagaagacaaccaaatatatattaatgaaacaaatgcaatgcctggatttacggctttcagtatgtatccaaagttatgggaaaatatgggcttatcttatccagaattgattacaaaacttatcgagcttgctaaagaacgtcaccaggataaacagaaaaataaatacaaaattgactaactgaggttgttattatgattaatgttacattaaagcaaattcaatcatggattccttgtgaaattgaagatcaatttttaaatcaagagataaatggagtcacaattgattcacgagcaatttctaaaaatatgttatttataccatttaaaggtgaaaatgttgacggtcatcgctttgtctctaaagcattacaagatggtgctggggctgctttttatcaaagagggacacctatagatgaaaatgtaagcgggcctattatatgggttgaagacacattaacggcattacaacaattggcacaagcttacttgagacatgtaaaccctaaagtaattgccgtcacagggtctaatggtaaaacaacgactaaagatatgattgaaagtgtattgcataccgaatttaaagttaagaaaacgcaaggtaattacaataatgaaattggtttacctttaactattttggaattagataatgatactgaaatatcaatattggagatggggatgtcaggtttccatgaaattgaatttctgtcaaacctcgctcaaccagatattgcagttataactaatattggtgagtcacatatgcaagatttaggttcgcgcgaggggattgctaaagctaaatctgaaattacaataggtctaaaagataatggtacgtttatatatgatggcgatgaaccattattgaaaccacatgttaaagaagttgaaaatgcaaaatgtattagtattggtgttgctactgataatgcattagtttgttctgttgatgatagagatactacaggtatttcatttacgattaataataaagaacattacgatctgccaatattaggaaagcataatatgaaaaatgcgacgattgccattgcggttggtcatgaattaggtttgacatataacacaatctatcaaaatttaaaaaatgtcagcttaactggtatgcgtatggagcaacatacattagaaaatgatattactgtgataaatgatgcctataatgcaagtcctacaagtatgagagcagctattgatacactgggtactttgacagggcgtcgcattctaattttaggagatgttttagaattaggtgaaaatagcaaagaaatgcatatcggtgtaggtaattatttagaagaaaagcatatagatgtgttgtatacgtttggtaatgaagcgaagtatatttatgattcgggccagcaacatgtcgaaaaagcacaacacttcaattctaaagacgatatgatagaagttttaacaagcgatttaaaagcgcatgaccgtgtattagttaaaggatcacgtggtatgaagttagaagaagttgtaaatgctttaatttcatag

SEQ ID NO: 127 - DNA, 3889 bp, Staphylococcus aureus
atggaattttcacaaaaattgtaccaagctgcaaagccaatcattaatgatatttatgaggatgactttattcagaagatgttatccggagatataggagctgacgcattacgccattacttaaaagctgatgctgcgtatttaaaagaatttacaaacttatatgctttgttaattccaaaaatgaatagcatgaatgacgtaaaatttttagtagagcaaatagaatttatggttgaaggtgaagtacttgcgcatgatattttagcgcaaattgttggtgaatcatacgaagaaatcattaaaacaaaagtttggcctccaagtggcgaccattacataaaacatatgtatttccaagcgcatagtcgtgaaaatgctatttatacaattgctgcaatggcaccttgtccatatatttatgcagaattagctaagcgctctcaaagtgatcataagcttaatagagaaaaagatacggcaaaatggtttgatttttatagtactgaaatggatgacataattaacgtatttgaggcattaatgaataaattagccgaatcaatgtctgacaaggaattggaacaagtaaagcaagtatttttagaaagttgcatacatgagcgtcgatttttcaatatggctatgacactagaacaatgggaatttggaggaaaagtaaatgattaaacctaaaatagcattaaccattgcaggtactgatccaacaggtggtgccggcgtaatggctgatttaaaatcatttcattcatgtggtgtatatggtatgggcgtcgttacaagtattgttgctcaaaatacattgggcgtacaacatattcataatttaaatcatcaatgggtagatgaacaacttgatagtgtcttcaatgataccttacctcatgctattaaaacggggatgattgctacagcagatactatggaaacgattcgtcattatttaatgcaacatgaatctattccatatgtaattgatcctgttatgttggcgaaaagcggtgattcattaatggataatgacacaaagcaaaacttgcagcatacgttattgccattagctgacgtagtaacaccgaatttaccagaagctgaagaaataacgggactaaccattgatagtgaagaaaaaattatgcaggctggccgcatctttattaatgagattggtagtaaaggtatcatcattaaaggcggtcattcaaatgatactgatatagcaaaagattatttatttactaacgaaggtgttcaaacatttgaaaatgaacgatttaaaacaaaacatacgcatggaacagggtgtacattttcagcagttataacggcagaacttgcaaaaggtagaccattatttgaggctgtacacaaggctaaaaagtttatttcaatgagtatacaatatacacctgaaatcggccgtggtagaggaccagtgaatcattttgcatatttaaagaaagagggattagacgatgaattatctaaataaaatacgtattgaaaacccattaacaatttgttatacaaacgatgtagttaaaaattttacagcgaatggtttattaagtattggtgcgagccctgccatgagtgaagctcccgaagaagctgaagaattttacaaagttgcacaagcgctattaatcaatatcggtactttaacagcacaaaatgaacaagatattattgcgattgctcaaacggcaaatgaggcaggcttacctattgtatttgaccctgtagctgttggtgcttctacatatcgaaagcaattttgtaaattattattgaaatcagcgaaagtatcagtaattaaaggcaatgcatctgaaatattagcgttgattgatgatacagcaactatgaaaggtacagatagtgatgctaatcttgatgcggttgcaatagcgaaaaaggcttacgcaatatataaaactgcaatagtaatcacaggtaaagaggacgttattgttcaagataataaagccatcgtattagctaatggatctccattattagcacgagtaactggagctggttgtttattaggaggcgttattgctggatttttatttagagaaacagaaccagacatagaagcgttaattgaagcggtaagcgtatttaatattgctgctgaggtagctgctgaaaatgaaaattgtggtggtcctggtacgttttcaccattgttgcttgatacgttatatcatttaaatgaaacaacctatcaacaacggattcgtattcaagaggtggaataatatgtttaaccaatcgtatctaaatgtgtattttatttgtgggacctccgatgttccgagtcatcgaactattcatgaagtattagaagcagcattaaaggcagggattacacttttccaatttcgagaaaagggtgaatcagctttaaaaggaaacgataaacttgtattagctaaagaattacagcatctctgtcatcaatatgatgtgccttttatcgttaatgatgatgtatccttggcaaaagaaattaacgcggatggtatacatgtcggtcaagatgatgcgaaagtcaaagagatagcacaatatttcactgataaaattattggacttagtattagtgatttagatgagtatgcaaaatctgatttaactcatgttgattatataggtgttggaccaatctatcctacgccgtcgaagcatgacgcgcatataccagtaggtccagaaatgattgcaacgtttaaagaaatgaatccgcaactaccgattgtagctattggcggtatcaatactaataatgtggcgccgattgtagaagcaggtgccaatggaatttcagtcatttcagccatttctaaaagtgaaaatattgaaaagactgttaatcgattcaaagatttttttaataattagttaaatttttccacttattgtttcatacgtactcattaatgtgatagaataaatcctatgtgaatataatgatagaggtggaaaaatgaagaaaaaagcgttactaccattatttttaggtattatggtctttttggctggttgtgactattctaaacctgaaaaacgtagtgggtttttctacaatacattcgtagatccaatgaaaaatgtattggattggttgggaaataacttattaaacgacaattatggtttagctattattatccttgtattggtaattcgtattattttattaccattcatgttgtcaaactataaaaatagtcatatgatgcgtcaaaaaatgaaagttgcaaagccagaagttgaaaaaattcaagaaaaagtgaaacgtgcgcgtacacaagaagaaaaaatggctgcaaaccaagaattaatgcaagtatataaaaagtatgacatgaacccgattaagagtatgttgggttgtttaccaatgctaatccaattgccaatcatcatgggattatactttgtacttaaagaccaacttgtagatggtttgtttaaatatccacacttcttatggttcgatttaggacgtcctgatatttggattacaattattgccggtgttttatactttatccaagcatatgtatcaagtaaaacgatgccagacgaacaacggcaaatgggttacatgatgatggtcatttcaccaattatgattatctggatttcattaagctcagcatcagcacttggtttgtactggtctgtcagtgcggcgttccttgtagttcaaacacactttgcgaacatttattatgaaaaagtcgctaaaaaagaagtacaacctttcattgaagcgtatgaaagagagcacaacggcggcagcaataaaaaaggcaaaaacacacaagtagtgtctaaaaagaaaaagaaataa

SEQ ID NO: 128 - DNA, 873 bp, Staphylococcus aureus
atgaagaaaaaagcgttactaccattatttttaggtattatggtctttttggctggttgtgactattctaaacctgaaaaacgtagtgggtttttctacaatacattcgtagatccaatgaaaaatgtattggattggttgggaaataacttattaaacgacaattatggtttagctattattatccttgtattggtaattcgtattattttattaccattcatgttgtcaaactataaaaatagtcatatgatgcgtcaaaaaatgaaagttgcaaagccagaagttgaaaaaattcaagaaaaagtgaaacgtgcgcgtacacaagaagaaaaaatggctgcaaaccaagaattaatgcaagtatataaaaagtatgacatgaacccgattaagagtatgttgggttgtttaccaatgctaatccaattgccaatcatcatgggattatactttgtacttaaagaccaacttgtagatggtttgtttaaatatccacacttcttatggttcgatttaggacgtcctgatatttggattacaattattgccggtgttttatactttatccaagcatatgtatcaagtaaaacgatgccagacgaacaacggcaaatgggttacatgatgatggtcatttcaccaattatgattatctggatttcattaagctcagcatcagcacttggtttgtactggtctgtcagtgcggcgttccttgtagttcaaacacactttgcgaacatttattatgaaaaagtcgctaaaaaagaagtacaacctttcattgaagcgtatgaaagagagcacaacggcggcagcaataaaaaaggcaaaaacacacaagtagtgtctaaaaagaaaaagaaataa

SEQ ID NO: 129 - DNA, 2085 bp, Staphylococcus aureus
atggattatatcggacaatatgcagttatccatttagtgttacatgttgtatgtatttgtattgcctattgggctttacaatcaattagattagatcaattttttaaaaaaggatacgccactcaattacaagtgtgtatgatatttgttgctattttattaggcactgcagtaagcaattttattgtagatttgttacaatactcgacgcaggtaaaatatttaataaaataagtctaactctatgatttgtaatcaaaactagatataattaaataatgacttaaaataattttaaaatagggaaatgtaaagtaataggagttctaagtggaggatttacgatggataaaatagtaatcaaaggtggaaataaattaacgggtgaagttaaagtagaaggtgctaaaaatgcagtattaccaatattgacagcatctttattagcttctgataaaccgagtaaattagttaatgttccagctttaagtgatgtagaaacaataaataatgtattaacaactttaaatgctgacgttacatacaaaaaggacgaaaatgctgttgtcgttgatgcaacaaagactctaaatgaagaggcaccatatgaatatgttagtaaaatgcgtgcaagtattttagttatgggacctcttttagcaagactaggacatgctattgttgcattgcctggtggttgtgcaattggaagtagaccgattgagcaacacattaaaggttttgaagctttaggcgcagaaattcatcttgaaaatggtaatatttatgctaatgctaaagatggattaaaaggtacatcaattcatttagattttccaagtgtaggagcaacacaaaatattattatggcagcatcattagctaagggtaagactttaattgaaaatgcagctaaagaacctgaaattgtcgatttagcaaactacattaatgaaatgggtggtagaattactggtgctggtacagacacaattacaatcaatggtgtagaatcattacatggtgtagaacatgctatcattccagatagaattgaagcaggcacattactaatcgctggtgctataacgcgtggtgatatttttgtacgtggtgcaatcaaagaacatatggcgagtttagtctataaactagaagaaatgggcgttgaattggactatcaagaagatggtattcgtgtacgtgctgaaggggaattacaacctgtagacatcaaaacactaccacatcctggattcccgactgatatgcaatcacaaatgatggcattgttattaacggcaaatggtcataaagtcgtaaccgaaactgtttttgaaaaccgttttatgcatgttgcagagttcaaacgtatgaatgctaatatcaatgtagaaggtcgtagtgctaaacttgaaggtaaaagtcatattgcaaggtgcacaagttaaagcgactgatttaagagcagcagcagccttaattttagctggattagttgctgatggtaaaacaagcgttactgaattaacgcacctagatagaggctatgttgacttacacggtaaattgaagcaattaggtgcagacattgaacgtattaacgattaattcagtaaattaatataatggaggatttcaaccatggaaacaatttttgattataaccaaattaaacaaattatacctcacagacagccatttttattaattgataaagtagttgaatatgaagaaggtcaacgttgtgtggctattaaacaagtatcaggaaacgaaccattctttcaagggcattttcctgagtatgcggtaatgccaggcgtattaattactgaagcgttagctcaaacaggtgcggtagctattttaaatagtgaagaaaataaaggtaaaatcgctttatttgctggtattgataaatgtcgttttaaacgtcaagtagtacctggtgatactttaacgttggaagtagaaatcactaaaattaaaggaccaatcggtaaaggtaatgctaaagctactgtcgatggtcaacttgcttgtagttgtgaacttacatttgcaattcaagatgtaaaataa

SEQ ID NO: 130 - DNA, 6901 bp, Staphylococcus aureus
atgagtcgtttctacaacatttttaaacagttcattcaatattatttttatctaataataatattgggaggattatacctttatacacaccatgcatttatcttaggattaatcattggtgttactggttctgcaatcaacacatgtatttttgaatgctatttagctaaagctaaaagaccagacactatgcatatttcaactggaaatatgtggcgatacttagttgcaattattgcctgtatgatttggtaccttaataaagcgcatgtaagtatcatcggtataattattggtttaatgatttcatatgttgtagttatcatacgtcctttactaaaggtgagcaaataaattaagaaagaggtgagattatggatcacaaatccccgctcgtgagttggaatttattcggttttgatatcgttttcaatttatcaagtatattgatgatacttgttacggcgtttcttgtttttctacttgctatcatttgtacgcgtaatttgaaaaaaagaccaactggcaaacaaaatttcgttgaatggatttttgatttcgtgaggggaatcattgaaggtaacatggcttggaaaaaaggtggtcaattccacttcttagcagtaacgctgattctgtacatttttatagctaatatgttaggtcttccgttttctatagtaacgaaagatcacacattgtggtggaaatcaccgacagctgatgcaacagtgactttaacgttgtctacaacgataatactgttaactcacttttatggaattaaaatgcgtggtacgaaacaatatcttaaaggttatgtacagccgttttggccattggcaattattaatgtttttgaagagttcacttcaacattaacgcttggtctgcgtttgtacggtaacatatttgcaggtgagatactattaacattacttgctggcttattctttaacgaaccagcatggggttggattattagtatcccaggattaattgtttggcaagcattttcaatatttgtaggaacaatccaagcatatatctttattatgctttcgatggtttatatgtcacataaagtggcagatgaacactaaaaatttcaataattatatacaatcacaggaggaaattaaattatgaatttaatcgcagcagcaatcgcaattggtttatcagcattaggagcaggtatcggtaacggtttaatcgtttcaagaacagttgaaggtgtagcacgtcaaccagaagcacgtggtcaattaatgggtatcatgttcattggtgtaggtttagttgaggcattacctatcatcggtgtagtaattgcattcatgacatttgctggataattaacagataaaagaggtcgggacaaagcgcataggacataattcatgatgcatatatagtaatatctttgaactttattaaatagttgagatatgaatgcaccatgcctatcgcataaattcagtaggtcctaacctcgtcgtttttttctatataacactagcgattattttaatgaaaggagtgtcatgaacccgtgactgaaacagctaacttattcgttcttggtgcagctggaggcgttgagtggggtactgtgattgtacaggtcctaactttcatcgtgttacttgcgttacttaaaaagttcgcatggggtccattgaaagatgtaatggataaacgtgaaagagatattaacagagatatcgatgacgcagaacaagctaagttaaatgcacagaaacttgaagaagaaaataaacaaaaacttaaagaaacacaagaagaagttcaaaagattttagaagatgctaaggttcaagcacgtcaacagcaagaacaaattattcatgaagcaaacgtacgtgcaaacggtatgattgaaacagcacaaagtgaaatcaatagccaaaaagaacgtgccattgcagatattaataatcaagtatctgaactatcagtgttaattgcttctaaagttcttagaaaagaaatttctgaacaagaccaaaaagcattggttgacaagtatctaaaagaggcaggcgataaataatggtaaaagtagctaacaagtatgctaaagcattatttgacgtgtcattagatacaaataatttagagactattaatgaagaattaacagttataaatgaagcagtaaaagataaaattgagcaattgaaaatggttgacagtaatccaactcaaacagcagaacaacgtcgtgagttgattaatggtgtatttactgacattaatccatacattaaaaatatgatgtacgtgttagcagataatagacatatctcattaatagctgacgtattcaaggcgttccaaagcttatataacggacactacaatcaagattttgcaacaattgagtcaacatatgaattgagtcaagaagagttagataagattgtcaaactagtaactcaacaaacgaagttatctaaagttattgtagatacaaaaattaatccagatttaattggtggatttagagttaaagtcggcacaactgtattagatggtagtgttagaaatgatcttgtccaattacaaagaaaatttagaagagttaattaattataaagaggagtgacatagatggccataaaagctgaagaaatcagtgcattacttcgctcacaaattgaaaattatgagtcagaaatgtccgtaactgatgtaggtactgtattacaaattggtgatggtattgcattaattcacggattaaatgacgttatggctggtgagctagtagaattccataacggcgtacttggtttagcccaaaaccttgaagagtcaaacgtgggtgtggttattttaggaccatatacaggtattactgaaggtgacgaagttaaacgtactggtcgtatcatggaagtaccagtaggtgaagaactaatcggaagagttgttaatccattaggacaacctattgatggacaaggaccgattaacacaactaaaacacgtccagtagagaaaaaagctactggtgtaatggatcgtaaatcagtagatgagccattacaaacaggtatcaaagcaattgatgctttagtaccaattggtagaggtcaacgtgagttaatcattggtgaccgtcaaacaggtaaaacaacaattgcaattgacacaattttgaaccaaaaagatcaaggtacgatttgtatctatgttgctattggtcaaaaagattcaacagtaagagcaaatgttgaaaagttaagacaagcaggcgctttagactacactattgttgtagcagcatcagcttctgaaccttctccattattatatattgcaccatattcaggtgtaacaatgggtgaagaattcatgtttaacggtaaacatgttttaatcgtttatgatgatttaactaaacaagcagcagcttatcgtgagttatcattattattacgtagacctccaggtcgtgaagcatacccaggtgacgtattctacttacatagtagattattagaaagagcagcaaaattaaacgatgacttaggtggcggttcaattactgcattaccaattatcgaaacacaagctggtgatatttcagcttatgtaccaacaaacgttatttcaattacagatggacaaatcttcttacaatctgatttattcttctcaggtgtaagaccagcgattaatgccggacaatctgtatctcgtgttggtggatctgcacaaattaaagcaatgaagaaagttgctggtacgttacgtcttgacttagcgtcatacagagaacttgaatcatttgcacaattcggttcagaccttgatgaatttactgcaagtaaattagaacgtggtaaacgtaccgttgaagtcttaaaacaagatcaaaacaaaccattaccagtcgaacaccaagtgttgattatttatgcattaacaaaaggatatttagatgatattccagttgtagatatcacacgttttgaagacgagttaaaccactgggcagaatcaaatgctactgaactgttaaatgaaatcagagaaactggtggcttaccagatgctgagaagtttgacacagcaattaacgaattcaaaaaaagctttagcaaatctgaataataaacaagtttagtataaggtggtgagatagtggcttctcttaaagaaatagatactcgaataaaatcaaccaaaaaaatgaagcagattacgaaagcgatgaacatggtatcaagttcaaaacttcgtagagctgaaaaaaatacaaaacaattcacaccatatatggataaaatgcaagatgcaattactgcagttgcaggggcaagtagcaatacaaaccatccaatgctaagacctcgtaaaattactagaagtggatatttagttatcacgagtgataaaggtttagcaggtgcatatagtgcaaacgtgcttaaaaaattgattactgatattgaagcgaaacatcaagatagtagcgaatacagtattgtagttttagggcaacaaggtgttgatttcctaaaaaatagaggttatgacattgagtattctcaagtagacgtacctgatcaaccttctttcaaatctgttcaagcactagctaaccatgctatagacttatacagtgaagaagaaattgatgaattaaatatatactatagtcattatgtcagcgttcttgaaaacaagcctacatctagacaagtattaccattatctcaagaggattctagtaaggggcatggtcatttgtcttcttatgaatttgagccagataaagaatctatcttaagtgtaatcttgcctcaatatgttgagagtttgatttacggaacaatattagacgcaaaagcaagtgagcatgcaacacgtatgactgcgatgaaaaatgccactgataatgcaactgaacttattgatgacttatcattagaatataacagagcgagacaagcagaaattacgcaacaaattactgaaattgttggtggttccgcagcgcttgaataatatttaaaggaggaaaatagcatgggaattggccgtgtaactcaagttatgggtcctgtaattgatgttcgatttgaacataacgaagttcctaaaattaataacgccttggttattgatgtgcctaaagaagaaggtacaatacaactaacattagaagttgcgctgcaattaggtgacgacgttgttcgtacaattgcgatggattcaactgatggtgtccaaagaggcatggatgtaaaagatacaggcaaagaaattagtgtacctgttggtgacgaaacattaggtcgtgtatttaatgtactaggtgaaacaattgaccttaaagaagaaattagtgattctgttcgccgcgatcctatccatcgtcaagcaccagcattcgatgaactttcaacagaagttcaaattttagaaacaggtattaaagtagtagatttactagcaccttatattaaaggtggtaaaatcggattgttcggtggtgccggtgtaggtaaaacagtattaatccaagaattaattaacaacatcgctcaagagcacggtggtatttctgtattcgccggtgtaggtgaacgtactcgtgaaggtaacgatttatacttcgaaatgagtgacagtggtgtaattaagaaaacagccatggtattcgggcaaatgaatgagccacctggtgcacgtatgcgtgttgcattatctggtttaacaatggctgaatatttccgtgacgaacaaggtcaagacgtattattattcatcgataacattttcagatttacacaagctggttctgaggtatctgcattattaggtcgtatgccttctgcagtaggttaccaaccaacacttgctactgaaatgggacaattacaagaacgtattacgtctacaacaaaaggatcagttacttctattcaagcggtattcgtacctgccgatgactatactgacccagcgcctgcgacagcgtttgcccatttagatgcaactactaacttagaacgtaaattaactgaaatgggtatttatccagccgtggatccattagcgtctacatcaagagcattggaaccatcaattgtaggtcaagaacattatgaagtagctcgtgatgtacaatcaacacttcaaaaataccgtgaattgcaagatatcattgctatcttaggtatggacgaattatctgatgaagataaacaaacagttgaacgcgcacgtagaattcaattcttcttatctcaaaacttccacgtagcggaacaatttactggtcaaaaaggttcttatgtacctgttaagacaacagttgcaaactttaaagatatcttagatggtaaatatgaccatattccagaagatgcattccgtttagttggtagcatggatgatgttattgcaaaagctaaagatatgggtgttgaagtataacaattaggaggaatggataatgaatacattaaacctagatattgtcactcctaatggttctgtttacaatcgtgataatgttgaactcgttgttatgcaaacaacagctggtgagataggtgtcatgagtggacatattccaactgtagctgctttaaaaacaggctttgtaaaagtgaaatttcacgatggaactgaatatattgctgtaagcgatggctttgttgaagttagaaaagataaagtttcaatcattgttcagactgcagaaactgcaagagaaattgatgttgaaagagctaaattagccaaagcaagagcagagtctcacttggaaaatgatgacgacaatactgatattcatagagccgaaagagctttagagagagcaaataaccgtttgcgtgtggctgaattaaaatag

SEQ ID NO: 131 - DNA, 3598 bp, Staphylococcus aureus
atgaaagatttgacaatgttattagacgaattaaaagatatgtccttttttaataaaggagatatatgtttaattggatgttcaacatcggaagtcattggcgaaaaaatagggactgtcggttcgatggaagttgcagaaactatttttaatgcattagatgttgtgagtaaagagacaggcgttacttttgcttttcaaggatgtgaacatatcaacagagcgataacaatagaaaaatctcagtataatccattaacaatggaagaagtttccgtcgttccagatgtacatgctggagggagtttggcaacatacgcttttcagcatatgaaggatccgatcgtggtcgaacatattactgttccttgtggaattgatattggtcaaacattaataggcatgcatattaaacatgtatgtgtacctgtaaggacctcagtaaagcaagtaggacaggcaattgtaactattgccacatctaggccgaaaaagattggtggcgaacgtgctaaatacaaataagtttttttgaaagaaggggagattttatgtcttatatcaccaagcaagataaagttatcgcagaagcaatcgagagagaatttcagagacaaaatagcaacatagagttaatcgcatcggaaaattttgtatcggaagcggttatggaagcacaaggttcagtgttgactaataagtatgctgaaggctatccaggacgccgatattatggtggatgtgagtttgtagatgttactgaaagcatcgcaattgatcgtgctaaagcattgtttggagctgaacatgtcaatgttcaaccacattcaggttcacaagcgaacatggctgtttacttagttgcattagaaatgggcgacacagttttaggtatgaatttgagtcatggtggtcacttgacacatggagcgcctgttaattttagtggtaaattctacaatttcgttgaatatggagtagataaagacacagaacgaatcaattatgatgaagttcgtaaattagcgttagagcataagcctaagcttattgtggcaggagcatcagcatattcaagaacaattgacttcaaaaagtttaaagaaatcgcagatgaagtaaacgctaagttaatggtagacatggcacatattgcaggattagtagcggcaggtttacatccaaatccagtagaatatgctgattttgtaacaactacaacacacaaaacattacgcggaccacgtggtggtatgattttatgtaaggaagaatataaaaaagacatagataaaacaattttccctggtattcaaggtggacctcttgagcatgttattgcagcaaaagcagttgcttttggagaagcgttagaaaataatttcaaaacgtatcaacaacaagtggttaaaaacgcaaaagttcttgcagaagcattaattaatgaaggatttagaattgtttctggcggtacagataatcacttagtagctgttgatgtaaaagggtctataggacttactggtaaagaagctgaagagactttagattcagttggtatcacatgtaacaaaaataccattccgttcgatcaagaaaaaccttttgtaacgagtggtatacgtttaggtacacctgctgcaacaacgcgtggatttgatgaaaaagcttttgaggaagttgcaaaaatcatcagtttagcattgaaaaatagtaaagatgaagaaaaattacaacaagctaaagaacgcgttgcgaaattaacagctgaatatcctctatatcaataaacatacacaaagataggagtaatttttatgagtaaagtacacgttttcgatcatccattaattcaacacaaactaagctatattagagatgtaaatacaggtactaaagaatttagagaacttgtagacgaagttggtatgttgatggcatatgaagtaactagagacttagagcttcaggatgttgatattgaaacgcctgtaactaaaatgacggctaaacgattagctggtaaaaaattagctatcgttccaattttaagagctggtttaggtatgactgatggtattttaagtttagtacctgcagccagagttggacatatcggtttatatcgagatcccgaaacattaaaggctgtagagtattttgctaagttacctcaagatattactgaaagacaaatcattgttgttgatcctatgttagcaacaggcgcatcagcaattgaagctattacttcattgaagaaacgtggcgctaaaaatattcgcttcatgtgtttaattgcagcaccagaaggcgtagaaaagatgcatgaagcacatccggatgtagatatttatattgctgcacttgatgaaaagctaaatgataaagcatatatcacaccagggttaggcgacgctggagatagattgtttggtactaaatagaagaatcggagataagtagtttgatgaaaaagattatgaccatatttggaacaagacccgaagccataaagatggctcctttagttaaagctttggaacaagaaaaaatgctcgagccaattgttgttgttacagcacagcatagagaaatgcttgattcagtattaagtacctttgaaatcaaaccaaaatacgatttgaatattatgaaatcaggacagacactttctgagataacttctaaatcaatcactcaattagaacaagtgattcaattagaaaaaccagacatggtacttgtacatggtgatacgatgacgacatttgcaggtggtttagcggcattttataaccaagtgccgattggacacgttgaagcagggcttagaagttatgataaatattcaccttttccagaagaggtgaatagacaattagttggtgtattagctgacttacattttgcacctactaaaaatgctgcatcgcatttgttaagtgaagggaaatattcagaaagtgttgttgtcactggtaatactgcgattgatgctatgaaatatacagttgatgacaattataaatctaacatcatggataaataccatgacaaaaaattcattcttatgacagcacaccgacgagaaaatatcgggaaacccatggaaaatatatttaaagcggttagacgcttaatagatgagtatactgatttagcactggtatatccaatgcataaaaacccgaaagttcgagaggtggctcaaaagattttaggtagtcatgacagaattgaattgattgaacctttggacgtagtagatttccataattttgctaaaaaatcttattttattttgacagattcaggtggaattcaggaagaagcgccatcatttaataagccagttttagttttgcgaagcgttacagaacgtcctgaaggtgttgaagctggcacattaaaagtcattggaacaaataagcaaaatgtgtatcaagctgcaaaagaattaatcgatgatgagagattatatcatcaaatgtctgaagcatctaatccttacggtgatggatttgcttcagaaagaatagttaatcatattaagtattatttgaatttaatcactgaaaaaccaagcgatttctga

SEQ ID NO: 132 - DNA, 4046 bp, Staphylococcus aureus
atgtatgaaacttaccattccggttggatagaatgtattacaggtagtatgtttagcggtaaatccgaagaactaataagacgtctaagaaggggtatatacgctaaacaaaaagtcgttgtatttaaaccggcgattgatgatcgatatcataaagaaaaagtggtctctcataatggtaatgccattgaagcgattaatatttctaaagcaagtgaaattatgacgcacaacttaactaatgttgatgttataggaatagacgaagtgcaattttttgacgatgaaattgtaagtatagtagaaaaactatcagcagatggacaccgtgttattgttgctggattagatatggattttaggggcgaaccgttcgaaccaatgcctaaattgatggctgtcagtgaacaagtaacgaaacttcaagcagtttgtgctgtttgtggttcttcatctagtagaacgcaacgattaataaatggtaaaccagctaaaatcgatgatccgattatcttagtaggtgccaatgaaagttatgagccacgttgtcgcgcgcaccatatcgtagcacctagtgataataataaggaggaattataagtgtttgatcaattagatattgtagaagaaagatacgaacagttaaatgaactgttaagtgacccagatgttgtaaatgattcagataaattacgtaaatattctaaagagcaagctgatttacaaaaaactgtagatgtttatcgtaactataaagctaaaaaagaagaattagctgatattgaagaaatgttaagtgagactgatgataaagaagaagtagaaatgttaaaagaggagagtaatggtattaaagctgaacttccaaatcttgaagaagagcttaaaatattattgattcctaaagatcctaatgatgacaaagacgttattgtagaaataagagcagcagcaggtggtgatgaggctgcgatttttgctggtgatttaatgcgtatgtattcaaagtatgctgaatcacaaggattcaaaactgaaatagtagaagcgtctgaaagtgaccatggtggttacaaagaaattagtttctcagtttctggtaatggcgcgtatagtaaattgaaatttgaaaatggtgcgcaccgcgttcaacgtgtgcctgaaacagaatcaggtggacgtattcatacttcaacagctacagtggcagttttaccagaagttgaagatgtagaaattgaaattagaaatgaagatttaaaaatcgacacgtatcgttcaagtggtgcaggtggtcagcacgtaaacacaactgactctgcagtacgtattacccatttaccaactggtgtcattgcaacatcttctgagaagtctcaaattcaaaaccgtgaaaaagcaatgaaagtgttaaaagcacgtttatacgatatgaaagttcaagaagaacaacaaaagtatgcgtcacaacgtaaatcagcagtcggtactggtgatcgttcagaacgtattcgaacttataattatccacaaagccgtgtaacagaccatcgtataggtctaacgcttcaaaaattagggcaaattatggaaggccatttagaagaaattatagatgcactgactttatcagagcagacagataaattgaaagaacttaataatggtgaattataaagaaaagttagatgaagcaattcatttaacacaacaaaaagggtttgaacaaacacgagctgaatggttaatgttagatgtatttcaatggacgcgtacggactttgtagttcacatgcatgatgatatgccgaaagcgatgattatgaagttcgacttagcattacaacgtatgttattaggagagcctatacagtatatagttggctttgcctcattttatggtagaacgtttgatgtaaactcaaattgtttgataccaagacctgaaactgaagaagtaatgttgcatttcttacaacagttagaagatgatgcaacaatcgtagatatcggaacgggtagtggtgtacttgcaattactttgaaatgtgaaaagccggatttaaatgttattgctactgatatttcacttgaagcaatgaatatggctcgtaataatgctgagaagcatcaatcacaaatacaatttttaacaggggatgcattaaagcccttaattaaagaaggtatcaagttgaacggcttgatatctaatccaccatatatagatgaaaaagatatggttacgatgtctccaacggttacgagattcgaaccacatcaggcattgtttgcagataaccatggatatgctatttatgaatcaatcattggagatttacctcacgttatggaaaaaggcagcccagttgtttttgaaattggttacaatcaaggtgaggcacttaaatcaataattttaaataaatttcctgacaaaaaaatcgacattattaaagatataaatggccacgatcgaatcgtctcatttaaatggtaattagaagttatgcctttgctatgattagttaagtgcatagctttttgctttatattatgataaataagaaaggcgtgattaagttggatactaaaatttgggatgttagagaatataatgaagatttacagcaatatcctaaaattaatgaaataaaagacattgttttaaacggtggtttaataggtttaccaactgaaacagtttatggacttgcagcaaatgcgacagatgaagaagctgtagctaaaatatatgaagctaaaggccgtccatctgacaatccgcttattgttcatatacacagtaaagttcaattaaaagattttacatatactttggatccacgcgtagaaaagttaatgcaggcattctggccgggccctatttcgtttatattgccgctaaagccaggctatctatgtcgaaaagtttctggaggtttatcatcagttgctgttagaatgccaagccattctgtaggtagacaattattacaaatcataaatgaacctctagctgctccaagtgctaatttaagtggtagaccttcaccaacaactttcaatcatgtatatcaagatttgaatgcccgtatagatggtattgttcaagctgaacaaagtgaagaaggattagaaagtacggttttagattgcacatcttttccttataaaattgcaagacctggttctataacagcagcaatgattacagaaatacttccgaatagtatcgcccatgctgattataatgatactgaacagccaattgcaccaggtatgaagtataagcattactcacccaatacaccacttacaattattacagatattgagagcaaaattggaaatgacggtaaagattggtcttctatagcttttattgtgccgagtaataaggtggcgtttataccaagtgaagcgcaattcattcaattatgtcaggatgacaatgatgttaaacaagcaagtcataatctttatgatgtgttacattcacttgatgaaaatgaaaatatttcagcggcgtatatatacggctttgagctgaatgataatacagaagcaattatgaatcgcatgttaaaagctgcaggtaatcacattattaaaggatgtgaactatgaagattttattcgtttgtacaggtaacacatgtcgtagcccattagcggaaagtattgcaaaagaggttatgccaaatcatcaatttgaatcaagaggtatattcgctgtgaacaatcaaggtgtttcgaattatgttgaagacttagttgaagaacatcatttagctgaaacgaccttatcgcaacaatttactgaagcagatttgaaagcagatattattttgacgatgtcgtattcgcacaaagaattaatagaggcacactttggtttgcaaaatcatgttttcacattgcatgaatatgtaaaagaagcaggagaagttatagatccatacggtggaacaaaagaaatgtatgtacatacctatgaagaacttgtaagtttaattttaaaattaaaagatattatttgctag

SEQ ID NO: 133 - DNA, 1684 bp, Staphylococcus aureus
atggctcaagaggtaataaaaataagaggtggacgcacactaaatggggaagttaatatcagtggcgcgaaaaacagtgctgtagctatcattcctgcaacattattagctcaaggacatgtgaaattagaagggttaccgcaaatctctgatgttaaaactttagtgagtttattagaagatttaaatattaaggcatcactaaatggtacggaattagaagttgatacaactgaaatacaaaatgctgcattaccaaataataaagttgaatcattacgtgcttcatactatatgatgggtgccatgttaggtagatttaaaaaatgtgtgattggtttaccgggaggatgtccacttgggccacgtccaattgatcaacatattaaaggatttaaagctttaggtgctgaaattgatgaatcaagcacgacatcaatgaaaattgaagctaaagaattaaaaggtgcgcatatttttctagatatggttagcgtaggtgcaacaattaacattatgctagctgcagtttatgcaacaggacaaactgtaattgaaaatgctgctaaagaaccggaagtagttgatgttgctaacttcttaacaagtatgggagctaatattaagggagcgggcacatcaacaattaaaatcaatggtgtcaaagaattacatggttctgagtatcaagttatacctgatagaattgaagcaggcacatatatgtgtatcgctgcagcatgtggagaaaatgttatattaaataatattgttccgaaacatgtagaaacattaactgctaaatttagtgaattaggtgtgaatgttgatgtaagagacgaaagaattcgcatcaataataatgcgccatatcaatttgttgatattaaaacactagtatatccaggttttgctactgatttgcaacagcctattacaccattattatttatggcaaatggtccttcatttgtaactgatacgatttatccggagcgttttaaacatgttgaagaattaaagcgcatgggtgcaaatattgaagttgacgaaggcacagcaacgataaaaccatcaacattacatggtgctgaagtttatgctagcgatttaagagcaggagcttgtttaattattgctggtttaattgctgagggtgtaactacaatttacaatgtaaaacatatttatagaggttatacagatattgtagaacacttaaaagctttaggtgcagatatttggacggaaactgtatagatttatcttgttttgtggtataataattatactgattaaaaaagggtgttcgtttacattctaaatttattgatgagaggtgaagatgatggaagtatgtccgtatctcgaagaaacttttaaaatacttggtagaagttggaatggattaatcattaattatctctcaagatgtaatgactgttcagcacacttttccgatatgaaaagagatttgaaaacaataacaccacgtgctttaagtcttaagttgtcagagcttgcacaatgggagttagttgagaagcaaatcatttctacgagtccagtacaaattatttatgtgctaactgaaaaaggtaaagcgttagcagaggctttacatccaattgaagcatgggcgcaatcatatgtcgatttaacagatcaacgtactgctaaataa

SEQ ID NO: 134 - DNA, 1260 bp, Staphylococcus aureus
atggctcaagaggtaataaaaataagaggtggacgcacactaaatggggaagttaatatcagtggcgcgaaaaacagtgctgtagctatcattcctgcaacattattagctcaaggacatgtgaaattagaagggttaccgcaaatctctgatgttaaaactttagtgagtttattagaagatttaaatattaaggcatcactaaatggtacggaattagaagttgatacaactgaaatacaaaatgctgcattaccaaataataaagttgaatcattacgtgcttcatactatatgatgggtgccatgttaggtagatttaaaaaatgtgtgattggtttaccgggaggatgtccacttgggccacgtccaattgatcaacatattaaaggatttaaagctttaggtgctgaaattgatgaatcaagcacgacatcaatgaaaattgaagctaaagaattaaaaggtgcgcatatttttctagatatggttagcgtaggtgcaacaattaacattatgctagctgcagtttatgcaacaggacaaactgtaattgaaaatgctgctaaagaaccggaagtagttgatgttgctaacttcttaacaagtatgggagctaatattaagggagcgggcacatcaacaattaaaatcaatggtgtcaaagaattacatggttctgagtatcaagttatacctgatagaattgaagcaggcacatatatgtgtatcgctgcagcatgtggagaaaatgttatattaaataatattgttccgaaacatgtagaaacattaactgctaaatttagtgaattaggtgtgaatgttgatgtaagagacgaaagaattcgcatcaataataatgcgccatatcaatttgttgatattaaaacactagtatatccaggttttgctactgatttgcaacagcctattacaccattattatttatggcaaatggtccttcatttgtaactgatacgatttatccggagcgttttaaacatgttgaagaattaaagcgcatgggtgcaaatattgaagttgacgaaggcacagcaacgataaaaccatcaacattacatggtgctgaagtttatgctagcgatttaagagcaggagcttgtttaattattgctggtttaattgctgagggtgtaactacaatttacaatgtaaaacatatttatagaggttatacagatattgtagaacacttaaaagctttaggtgcagatatttggacggaaactgtatag

SEQ ID NO: 135 - DNA, 3126 bp, Staphylococcus aureus
atggatttttccaacttttttcaaaacctcagtacgttaaaaattgtaacgagtatccttgatttactgatagtttggtatgtactttatcttctcatcacggtctttaagggaactaaagcgatacaattacttaaagggatattagtaattgttattggtcagcagataagtatgatattgaacttgactgcaacatctaaattattcgatatcgttattcaatggggggtattagctttaatagtaatattccaaccagaaattagacgtgcgttagaacaacttggtagaggtagctttttaaaacgctatacttctaatacgtatagtaaagatgaagagaaattgattcaatcggtttcaaaggctgtgcaatatatggctaaaagacgtataggtgcattaattgtctttgaaaaagaaacaggtcttcaagattatattgaaacaggtattgcaatggattcaaatatttcgcaagaacttttaattaatgtctttatacctaacacacctttacatgatggtgcaatgattattcaaggcactaagattgcagcagcagcaagttatttgccattgtctgatagtcctaagatatctaaaagtttgggtacaagacatagagctgcggttggtatttcagaagtatctgatgcatttaccgttattgtatctgaagaaactggtgatatttcggtaacatttgatggaaaattacgacgagacatttcaaacgaaatttttgaagagttgcttgctgaacattggtttggcacacgctttcaaaagaaaggtgtgaaataatatgctagaaagtaaatggggcttgagatttattgcctttcttttggcattgtttttctttttatctgttaataatgtttttggaaatatctttaacactggtaatcttggtcaaaagtctagtaaaacgattcaagatgtacccgttgaaattctttataacactaaagatttgcatttaacaaaagcgcctgaaacagttaatgtgactatttcaggaccacaatcaaagataataaaaattgaaaatccagaagatttaagagtagtgattgatttatcaaatgctaaagctggaaaatatcaagagaagtatcaagttaaagggttagctgatgacattcattattctgtaaaacctaaattagcaaatattacgcttgaaaacaaagtaactaaaaagatgacagttcaacctgatgtaagtcagagtgatattgatccactttataaaattacaaagcaagaagtttcaccacaaacagttaaagtaacaggtggagaagaacaattgaatgatatcgcttatttaaaagccacttttaaaactaataaaaagattaatggtgacacaaaagatgtcgcagaagtaacggcttttgataaaaaactgaataaattaaatgtatcgattcaacctaatgaagtgaatttacaagttaaagtagagccttttagcaaaaaggttaaagtaaatgttaaacagaaaggtagtttagcagatgataaagagttaagttcgattgatttagaagataaagaaattgaaatcttcggtagtcgagatgacttacaaaatataagcgaagttgatgcagaagtagatttagatggtatttcagaatcaactgaaaagactgtaaaaatcaatttaccagaacatgtcactaaagcacaaccaagtgaaacgaaggcttatataaatgtaaaataaatagctaaattaaaggagagtaaacaatgggaaaatattttggtacagacggagtaagaggtgtcgcaaaccaagaactaacacctgaattggcatttaaattaggaagatacggtggctatgttctagcacataataaaggtgaaaaacacccacgtgtacttgtaggtcgcgatactagagtttcaggtgaaatgttagaatcagcattaatagctggtttgatttcaattggtgcagaagtgatgcgattaggtattatttcaacaccaggtgttgcatatttaacacgcgatatgggtgcagagttaggtgtaatgatttcagcctctcataatccagttgcagataatggtattaaattctttggatcagatggttttaaactatcagatgaacaagaaaatgaaattgaagcattattggatcaagaaaatccagaattaccaagaccagttggcaatgatattgtacattattcagattactttgaaggggcacaaaaatatttgagctatttaaaatcaacagtagatgttaactttgaaggtttgaaaattgttttagatggtgcaaatggttcaacatcatcactagcgccattcttatttggtgatttagaagcagatactgaaacaattggatgtagtcctgatggatataatatcaatgagaaatgtggctctacacatcctgaaaaattagctgaaaaagtagttgaaactgaaagtgattttgggttagcatttgacggcgatggagacagaatcatagcagtagatgagaatggtcaaatcgttgacggtgaccaaattatgtttattattggtcaagaaatgcataaaaatcaagaattgaataatgacatgattgtttctactgttatgagtaatttaggtttttacaaagcgcttgaacaagaaggaattaaatctaataaaactaaagttggcgacagatatgtagtagaagaaatgcgtcgcggtaattataacttaggtggagaacaatctgggcatatcgttatgatggattacaatacaactggtgatggtttattaactggtattcaattagcttctgtaataaaaatgactggtaaatcactaagtgaattagctggacaaatgaaaaaatatccacaatcattaattaacgtacgcgtaacagataaatatcgtgttgaagaaaatgttgacgttaaagaagttatgactaaagtagaagtagaaatgaatggagaaggtcgaattttagtaagaccttctggaacagaaccattagttcgtgtcatggttgaagcagcaactgatgaagatgctgaaagatttgcacaacaaatagctgatgtggttcaagataaaatgggattagataaataa

SEQ ID NO: 136 - DNA, 5648 bp, Staphylococcus aureus
ttttatggagagtttgatcctggctcaggatgaacgctggcggcgtgcctaatacatgcaagtcgagcgaacggacgagaagcttgcttctctgatgttagcggcggacgggtgagtaacacgtggataacctacctataagactgggataacttcgggaaaccggagctaataccggataatattttgaaccgcatggttcaaaagtgaaagacggtcttgctgtcacttatagatggatccgcgctgcattagctagttggtaaggtaacggcttaccaaggcaacgatgcatagccgacctgagagggtgatcggccacactggaactgagacacggtccagactcctacgggaggcagcagtagggaatcttccgcaatgggcgaaagcctgacggagcaacgccgcgtgagtgatgaaggtcttcggatcgtaaaactctgttattagggaagaacatatgtgtaagtaactgtgcacatcttgacggtacctaatcagaaagccacggctaactacgtgccagcagccgcggtaatacgtaggtggcaagcgttatccggaattattgggcgtaaagcgcgcgtaggcggttttttaagtctgatgtgaaagcccacggctcaaccgtggagggtcattggaaactggaaaacttgagtgcagaagaggaaagtggaattccatgtgtagcggtgaaatgcgcagagatatggaggaacaccagtggcgaaggcgactttctggtctgtaactgacgctgatgtgcgaaagcgtggggatcaaacaggattagataccctggtagtccacgccgtaaacgatgagtgctaagtgttagggggtttccgccccttagtgctgcagctaacgcattaagcactccgcctggggagtacgaccgcaaggttgaaactcaaaggaattgacggggacccgcacaagcggtggagcatgtggtttaattcgaagcaacgcgaagaaccttaccaaatcttgacatcctttgacaactctagagatagagccttccccttcgggggacaaagtgacaggtggtgcatggttgtcgtcagctcgtgtcgtgagatgttgggttaagtcccgcaacgagcgcaacccttaagcttagttgccatcattaagttgggcactctaagttgactgccggtgacaaaccggaggaaggtggggatgacgtcaaatcatcatgccccttatgatttgggctacacacgtgctacaatggacaatacaaagggcagcgaaaccgcgaggtcaagcaaatcccataaagttgttctcagttcggattgtagtctgcaactcgactacatgaagctggaatcgctagtaatcgtagatcagcatgctacggtgaatacgttcccgggtcttgtacacaccgcccgtcacaccacgagagtttgtaacacccgaagccggtggagtaaccttttaggagctagccgtcgaaggtgggacaaatgattggggtgaagtcgtaacaaggtagccgtatcggaaggtgcggctggatcacctcctttctaaggatatattcggaacatcttcttcagaagatgcggaataacgtgacatattgtattcagttttgaatgtttatttaacattcaaatattttttggttaaagtgatattgcttatgcgagcgcttgacaatctattctttttaaagaaagcgattgtcagacaatgcattaagaaaaattaaagcggagtttacttttgtaaatgagcatttgattttttgaaaataaagcagtatgcgagcgcttgactaaaaagaaattgtacattgaaaactagataagtaagtaaaatatagattttaccaagcaaaaccgagtgaataaagagttttaaataagcttgaattcataagaaataatcgctagtgttcgaaagaacactcacaagattaataacgcgtttaaatctttttataaaagaacgtaacttcatgttaacgtttgacttataaaaatggtggaaacatagattaagttattaagggcgcacggtggatgccttggcactagaagccgatgaaggacgttactaacgacgatatgctttggggagctgtaagtaagctttgatccagagatttccgaatggggaaacccagcatgagttatgtcatgttatcgatatgtgaatacatagcatatcagaaggcacacccggagaactgaaacatcttagtacccggaggaagagaaagaaaattcgattcccttagtagcggcgagcgaaacgggaagagcccaaaccaacaagcttgcttgttggggttgtaggacactctatacggagttacaaaggacgacattagacgaatcatctggaaagatgaatcaaagaaggtaataatcctgtagtcgaaaatgttgtctctcttgagtggatcctgagtacgacggagcacgtgaaattccgtcggaatctgggaggaccatctcctaaggctaaatactctctagtgaccgatagtgaaccagtaccgtgagggaaaggtgaaaagcaccccggaaggggagtgaaatagaacctgaaaccgtgtgcttacaagtagtcagagcccgttaatgggtgatggcgtgccttttgtagaatgaaccggcgagttacgatttgatgcaaggttaagcagtaaatgtggagccgtagcgaaagcgagtctgaatagggcgtttagtatttggtcgtagacccgaaaccaggtgatctacccttggtcaggttgaagttcaggtaacactgaatggaggaccgaaccgacttacgttgaaaagtgagcggatgaactgagggtagcggagaaattccaatcgaacctggagatagctggttctctccgaaatagctttagggctagcctcaagtgatgattattggaggtagagcactgtttggacgaggggcccctctcgggttaccgaattcagacaaactccgaatgccaattaatttaacttgggagtcagaacatgggtgataaggtccgtgttcgaaagggaaacagcccagaccaccagctaaggtcccaaaatatatgttaagtggaaaaggatgtggcgttgcccagacaactaggatgttggcttagaagcagccatcatttaaagagtgcgtaatagctcactagtcgagtgacactgcgccgaaaatgtaccggggctaaacatattaccgaagctgtggattgtcctttggacaatggtaggagagcgttctaagggcgttgaagcatgatcgtaaggacatgtggagcgcttagaagtgagaatgccggtgtgagtagcgaaagacgggtgagaatcccgtccaccgattgactaaggtttccagaggaaggctcgtccgctctgggttagtcgggtcctaagctgaggccgacaggcgtaggcgatggataacaggttgatattcctgtaccacctataatcgttttaatcgatggggggacgcagtaggataggcgaagcgtgcgattggattgcacgtctaagcagtaaggctgagtattaggcaaatccggtactcgttaaggctgagctgtgatggggagaagacattgtgtcttcgagtcgttgatttcacactgccgagaaaagcctctagatagaaaataggtgcccgtaccgcaaaccgacacaggtagtcaagatgagaattctaaggtgagcgagcgaactctcgttaaggaactcggcaaaatgaccccgtaacttcgggagaaggggtgctctttagggttaacgcccagaagagccgcagtgaataggcccaagcgactgtttatcaaaaacacaggtctctgctaaaccgtaaggtgatgtataggggctgacgcctgcccggtgctggaaggttaagaggagtggttagcttctgcgaagctacgaatcgaagccccagtaaacggcggccgtaactataacggtcctaaggtagcgaaattccttgtcgggtaagttccgacccgcacgaaaggcgtaacgatttgggcactgtctcaacgagagactcggtgaaatcatagtacctgtgaagatgcaggttacccgcgacaggacggaaagaccccgtggagctttactgtagcctgatattgaaattcggcacagcttgtacaggataggtaggagcctttgaaacgtgagcgctagcttacgtggaggcgctggtgggatactaccctagctgtgttggctttctaacccgcaccacttatcgtggtgggagacagtgtcaggcgggcagtttgactggggcggtcgcctcctaaaaggtaacggaggcgctcaaaggttccctcagaatggttggaaatcattcatagagtgtaaaggcataagggagcttgactgcgagacctacaagtcgagcagggtcgaaagacggacttagtgatccggtggttccgcatggaagggccatcgctcaacggataaaagctaccccggggataacaggcttatctcccccaagagttcacatcgacggggaggtttggcacctcgatgtcggctcatcgcatcctggggctgtagtcggtcccaagggttgggctgttcgcccattaaagcggtacgcgagctgggttcagaacgtcgtgagacagttcggtccctatccgtcgtgggcgtaggaaatttgagaggagctgtccttagtacgagaggaccgggatggacatacctctggtgtaccagttgtcgtgccaacggcatagctgggtagctatgtgtggacgggataagtgctgaaagcatctaagcatgaagcccccctcaagatgagatttcccaacttcggttataagatccctcaaagatgatgaggttaataggttcgaggtggaagcatggtgacatgtggagctgacgaatactaatcgatcgaagacttaatcaaaataaatgttttgcgaagcaaaatcacttttacttactatctagttttgaatgtataatttacattcatatgtctggtgactatagcaaggaggtcacacctgttcccatgccgaacacagaagttaagctccttagcgtcgatggtagtcgaacttacgttccgctagagtagaacgttgccaggcataatattaatccacagtagctcagtggtagagctatcggctgttaaccgatcggtcgtaggttcgagtcctacctgtggagccatggctccttggtcaagcggttaagacaccgccctttcacggcggtaacacgggttcgagtcccgtaggagtcattattttggagaattagctcagctgggagagcatctgccttacaagcagagggtcggcggttcgaacccgtcattctccaccattttgattattaaattatatgaataagctggaggggtagcgaagtggctaaacgcggcggactgtaaatccgctccttcgggttcggcagttcgaatctgcccccctccaccatctatatattgggctatagccaagcggtaaggcaacggactttgactccgtcactcgttggttcgaatccagctagcccagccattagagccattagctcagttggtagagcatctgacttttaatcagagggtcagaggttcgaatcctctatggctca

SEQ ID NO: 137 - DNA, 4360 bp, Staphylococcus aureus
gtggaggataagaattcagttattgtatttaaaaatgtttcatttcaatatcaaagtgatgcatccttcacattgaaagatgtttcttttaatatacctaaaggtcagtggacatctattgttggtcataacggttctggaaaatctacaattgccaagttaatgattggcatagagaaagttaaatctggagaaattttttataataatcaagctataactgatgataattttgaaaagttaagaaaagacataggaattgtatttcagaatccggataatcaatttgttggttcaattgtaaaatacgatgtggcatttggactcgaaaatcatgcggttccacatgacgaaatgcatagaagagtcagcgaagcacttaaacaagttgatatgttagaacgtgcagattatgaacctaatgcattatcggggggacagaagcagcgtgtggctatagcaagtgtattagcacttaacccctctgtcattatattagatgaggcgacttctatgttagatcctgatgcacgtcaaaatttattggatttagtgagaaaagttaaatcagaacataatattacaatcatttctattacgcatgatttatctgaggcgatggaagcagatcatgttatcgttatgaataaagggactgtctataaagaaggcacagcgactgaaattttcgaccatgcagaagagttaacaagaataggtctagatttgccattcccaatcaaaataaatcaaatgctgggacaccaaacatcattcttaacttatgaagggctggtggatcaactatgactatacggtttgacaatgtaagttatacctatcaaaaagggacaccatatcagcatcaagctattcatgatgttaatacagaatttgaacaaggtaaatattacgccatcgttggacaaacgggtagtggtaaatcaacgttgatacaaaatattaatgcgctgttaaagccgactactgggacagttacagttgatgacattactattacacataagaccaaagataaatatattagacctgtaagaaaaagaattggaatggtatttcaatttcccgaatctcaattatttgaggacacagtagagcgtgaaatgatatttggacctaaaaactttaaaatgaatttagatgaagccaaaaactatgcccatcgtctgttgatggatttaggcttttcaagagatgtaatgtcacaatcaccatttcaaatgtcaggtggacaaatgcgtaaaatagcgattgtatcgatattggcaatgaatcctgatattatcgtggttgatgaacctacagcaggacttgatccacaaagtaaacgacaagtaatgagattactaaagtcactacaaacagatgaaaataaggcaattatcctaatttcacatgatatgaatgaagtcgcgcgttatgcagatgaagtcatcgttatgaaagaaggtagtatagtgtcgcaaacatcaccaaaagagctcttcaaagataaaaaaaaattggcggattggcatattggtttgccagaaattgttcagttacaatatgactttgaacaaaaatatcaaacaaaattaaaagatattgccttaactgaagaagcatttgtaagcttgtataaggagtggcaacatgaaaaataaattgattatagggcgatatttaccaattaattcttttgttcatcatcttgatccaagagcaaagttaatgtttgtttttctttttattatattaatatttttctgtcattcaccattaacatatctttgggtgtttgcacttatcttattcattatgagattagcaaaaattcaattatggttcctaatcaaaggtttaacaccaatatttttctttttaatcttcacattaatgatgcatatatttttaactaaaggtggatatgtattagttgaatggcatggcatcacgattgaaactaatggtattttagaagggctatatatatcattgcgtttaattgggattgtgatgattgcaacaattatgacactatctacaagtccaattgatttaacagatgcgtttgaaagattacttgcaccactaaagatgtttaaattaccagttcatcaattaagtatgataatgtccattgcgttacgattcatcccgacgttaatggatgagttagataaaattattttggcgcaaaagtcgcgtggttctgaaataagttcagggaacattgcaacacgtattaaatcatttattccattactagtgccactattcatctcagctttccaacgcgccgaagaattagcggtcgcaatggaagttaggggttatgatgccaatgttaagagaacgagctacagacagcttaaatggcaattgagagatacgatatctttaaccatgattatcccaattgcaattattttattcgtattaaaatattcaggagtgtaaattcatgcgtatattagtagaaattgcgtatcaaggaaataattttctaggctttcaaattcaacagaatggacgtacggtacagcaacaatttgaaaagctattacaacgcatgcataaaagacatgtgagaatccatccttcaagtaggactgatagaggtgtacatgcgatacagcagtactttcatttcgacacagagctgaatatacctatgtcacaatggcaatatgcaatgaaccgaacgttaccagatgatatttatgtcaataatgtagttacagtcgatgacgattttcattgtcgttacgattgtgtcggtaaacgctatcgatataaagtatatcaagcacaacaccgcgatccatttcaaagtggtttgaaaacatttattcctgaaacgttggatttagacaaaatgaacagagcggcgcaacaattcataggtacacatgattttacggggttttgttcgcaaaaaactgaagtagaaagcaaagttagaacattataccaaagtgaaatcgtaaagacagatgatggctttgattatattgtcactggatctggatttttatataacatggtgcgtgtcttagttgcatttttaatagaagttggaaaagggcgacatgaaatttctgatgtgccgaagctacttgaatcaaagaatcgtaagaatgttcctttcactgcaccggctgaaggactatatttagagaagatttatttagatgaaaatgagttattaaaagactttggcaacgatataaaaatacatcgcaaaaaatcattacaaaatgactgattgccattgacaaaaagcttgtgaaattataagattattaacggtattgttttatatccaccccacgataagccccggaaacttattgtgttacaagatatataagcagaaacgaacaacagttaacaaaataaatgaaattaaacgttttaaaaatgaaacaaatgaaatcatctattaggttatgaaactgtttatagcttgaatagaagcatttattttttaggaggacaattattatgcgtcaaacatttatggcaaatgaatcaaacattgagcgcaaatggtatgttatcgatgctgaaggccaaacattaggtcgtttatcatcagaagtagcatctatcttacgcggtaaaaataaagtaacttacacaccacacgttgatactggtgattatgtaatcgttattaatgcatcaaaaatcgaatttactggtaacaaagaaactgacaaagtttactaccgtcactcaaatcatccaggtggtatcaaatcaatcactgctggtgaattaagaagaactaacccagaacgtttaattgaaaactcaattaaaggtatgttaccaagcactcgtttaggcgaaaaacaaggtaaaaaattatttgtatatggtggcgctgaacatccacacgctgcacaacaaccagaaaactacgaattacgtggttaattagaaggaggaaatgactttggcacaagttgaatatagaggcacaggccgtcgtaaaaactcagtagcacgtgtacgtttagtaccaggtgaaggtaacatcacagttaataaccgtgacgtacgcgaatacttaccattcgaatcattaattttagacttaaaccaaccatttgatgtaactgaaactaaaggtaactatgatgttttagttaacgttcatggtggtggtttcactggacaagctcaagctatccgtcacggaatcgctcgtgcattattagaagcagatcctgaatacagaggttctttaaaacgcgctggattacttactcgtgacccacgtatgaaagaacgtaaaaaaccaggtcttaaagcagctcgtcgttcacctcaattctcaaaacgttaa

SEQ ID NO: 138 - DNA, 13916 bp, Staphylococcus aureus
atggcaaaacaaaaaatcagaatcagattaaaagcttatgatcaccgcgtgattgatcaatcagcagagaagattgtagaaacagcgaaacgttctggtgcagatgtttctggaccaattccgttaccaactgagaaatcagtttacacaatcatccgtgccgtgcatatgtataaagattcacgtgaacaattcgaacaacgtacacacaaacgtttaatcgatattgtaaacccaacaccaaaaacagttgacgctttaatgggcttaaacttaccatctggtgtagacatcgaaatcaaattataatagacaattttaggaggtggactttcgatgaccaaaggaatcttaggaagaaaaattgggatgacacaagtattcggagaaaacggtgaattaatccctgtaacagtagtagaagctaaagaaaatgttgtattacaaaagaaaactgtagaagttgatggatacaacgcaatccaagttggatttgaagacaaaaaagcatacaaaaaagatgcaaaatctaataaatatgctaataaaccagctgaaggtcacgctaaaaaagctgacgcagcacctaagcgcttcattcgtgaattccgcaatgtagacgtggatgcttacgaagtaggtcaagaagtctcagtagatacttttgtagctggcgacgttattgacgtaacaggcgtatcaaaaggtaaaggtttccaaggtgcaattaaacgccacggacaatctcgtggacctatgtcacacggttctcatttccacagagcaccaggttctgtaggtatggcttcagatgcttctagagtatttaaaggccaaaaaatgccaggacgtatgggtggaaacactgtaactgttcaaaacttagaagtagttcaagttgacacagaaaacaaagttatcttagtaaaaggtaacgtacctggacctaaaaaaggtttagtagaaatcagaacttcaattaaaaaaggtaataaataataagaagtgaaaggaggaaatgcataatggctaattatgatgttttaaaattagacggaactaaatcaggttcaatcgaattaagcgatgcagtattcggtattgagccaaataatagcgttttattcgaagctattaatttacaacgtgcttcattacgtcaaggtacgcatgctgttaagaatcgttcagcagtaagcggtggcggacgtaaaccatggaagcaaaaaggaacaggtcgtgctcgtcaaggtacaatccgtgctccacaatggcgtggcggtggtatcgtattcggaccaactccaagaagttatgcatacaaaatgcctaagaaaatgcgtcgtttagctttacgctcagcattatctttcaaagctcaagagaatggcttaactgtagttgacgcattcaacttcgaagctccaaaaactaaagaattcaaaaatgtattatctacattagaacaacctaaaaaagtattagtagttactgaaaacgaagatgtaaatgttgaattatcagcacgcaacatccctggcgttcaagtgacaactgctcaaggtttaaatgttttagatatcactaatgctgacagcttagtaattactgaagctgctgctaaaaaagttgaggaggtgctcggataatggaagcaagagatattcttaagcgccccgtaatcactgagaaatcttctgaagcaatggctgaagacaaatacactttcgacgttgatactcgtgttaacaaaacacaagtaaaaatggcagttgaagaaatcttcaacgtaaaagttgcaagtgttaatatcatgaattacaaacctaagaaaaaacgtatgggccgttaccaaggctatacaaacaaaagaagaaaagcgattgtaactcttaaagaaggatcaatcgacttatttaactaataaaacaattaccattaaggaggtaagcgacaatggctattaaaaagtataagccaataacaaatggtcgtcgtaatatgacttcgttagatttcgcagaaatcacgaaaactacacctgaaaagtcattattaaaaccgctaccgaaaaaagcgggacgtaacaaccaaggtaaattgactgtaagacaccatggtggtggacacaaacgtcaataccgtgttatcgattttaaacgtaacaaagatggtatcaatgcaaaagttgattctattcaatatgatccaaaccgctcagcaaacatcgctttagttgtatatgcagacggtgaaaaacgatatatcattgctcctaaaggattagaagtaggtcaaatcgttgaaagtggtgctgaagctgacatcaaagttggtaacgcattaccattacaaaacattccagttggtacagtagtacacaacatcgagcttaaacctggtaaaggtggacaaatcgctcgttcagctggtgcaagtgctcaagtacttggtaaagaaggtaaatacgtattaatcagattaagatctggtgaagttcgtatgatcttatctacttgccgtgctacaatcggtcaagttggtaacctacaacacgaattagttaacgttggtaaagccggacgttcaagatggaaaggtatccgtccaacagttcgtggttctgtaatgaaccctaacgatcacccacacggtggtggtgaaggtcgtgctcctatcggtagaccatctccaatgtcaccatggggtaaacctacgcttggtaagaaaactcgtcgtggtaaaaaatcatcagacaaacttatcgttcgtggacgtaagaaaaaataatataatcaacttatttgggtgtgcggcttaaagctgcacgcacataataagaagggaggcgcccaaatggctcgtagtattaaaaaaggacctttcgtcgatgagcatttaatgaaaaaagttgaagctcaagaaggaagcgaaaagaaacaagtaatcaaaacatggtcacgtcgttctacaattttccctaatttcatcggacatacttttgcagtatacgacggacgtaaacacgtacctgtatatgtaactgaagatatggtaggtcataaattaggtgagtttgctcctactcgtacattcaaaggacacgttgcagacgacaagaaaacaagaagataatatctattaagtagaggaggacatcctaatggaagcaaaagcggttgctagaacaataagaatcgcacctcgtaaagtaagactagttcttgacttaatcagaggtaaaaatgctgctgaagctattgcaattttaaaattaacaaacaaagcttcatcaccagtaattgaaaaagtattaatgtccgctttagctaatgctgaacataactatgacatgaacacagatgaattagtagttaaagaagcatatgctaacgaaggaccaacattaaaacgtttccgtccacgtgcgcaaggtcgtgcaagtgcgattaacaaacgtacaagccacattacaatcgtcgtaagtgacggtaaagaagaagctaaagaagcttaattaacttttaaggagggaatactgtgggtcaaaaaattaatccaatcggacttcgtgttggtattatccgtgattgggaagctaaatggtatgctgaaaaagacttcgcttcacttttacacgaagatttaaaaatccgtaaatttattgataatgaattaaaagaagcatcagtttctcacgtagagattgaacgtgctgcaaaccgtatcaacattgcaattcatactggtaaacctggtatggtaattggtaaaggcggttcagaaatcgaaaaattacgcaacaaattaaatgcgttaactgataaaaaagtacacatcaacgtaattgaaatcaaaaaagttgatcttgacgctcgtttagtagctgaaaacatcgcacgtcaattagaaaaccgtgcttcattccgtcgtgtacaaaaacaagcaatcactagagctatgaaacttggtgctaaaggtatcaaaactcaagtatctggtcgtttaggcggagctgacatcgctcgtgctgaacaatattcagaaggaactgttccacttcatacgttacgtgctgacatcgattatgcacacgctgaagctgacactacttacggtaaattaggcgttaaagtatggatctatcgtggagaagttcttcctactaagaacactagtggaggaggaaaataataatgttactaccaaaacgtgtaaaatatcgtcgtcaacatcgtcctaaaacaactggtcgttctaaaggcggtaactacgtaacatttggtgagtttggtttacaagctacaacaacgtcttggatcacatctcgtcaaatcgaatctgctcgtatagcaatgacacgttacatgaaacgtggcgggaaagtttggattaaaatcttcccacatacaccatatactaaaaaacctttagaagtacgtatgggtgctggtaaaggtgcggttgaaggctggatcgcagttgttaaaccaggtagaattttattcgaagttgctggcgtttctgaagaagttgcgcgtgaagcactacgtttagcaagtcacaaacttccagtaaaaactaagtttgtaaaacgtgaggaattgggtggtgaaacaaatgaaagctaaggaaattagagacttaaccacttcagaaatcgaagaacaaatcaaatcttcaaaagaagagctttttaacctacgctttcagttagctacaggtcaattagaagaaactgcacgtattcgtacagtaagaaaaacgattgcacgtctaaaaactgttgctcgtgaaagagaaattgaacaaagtaaggctaatcaataattaagtaagaggaggttacaaaagtgagcgaaagaaacgatcgtaaagtttatgtaggtaaagttgtttcagacaaaatggacaagactattacagtacttgttgaaacttacaaaacacacaaattatacggtaaacgagtaaaatactctaaaaaatacaaaactcatgatgaaaacaattcagctaaattaggagacattgttaaaattcaagaaactcgtcctttatcagcaacaaaacgttttcgtatagtagagattgttgaagagtcagtaattatttaatacaagtttagagataagggaggtttaactaatgatccaacaagaaacacgcttgaaagtagcagacaactctggtgctcgtgaagttcttacaatcaaagtattaggtggatctggtcgtaaaacagcaaacatcggcgatgttatcgtatgtactgttaaaaatgcaacaccaggtggcgttgttaaaaaaggtgacgttgtcaaagctgtaatcgtacgtactaagtcaggtgttcgtcgtaatgacggttcatacatcaaatttgatgaaaatgcatgtgttatcatccgtgatgacaaaggcccacgtggtactcgtatcttcggacctgttgctcgtgaattacgtgaaggtaacttcatgaaaatcgtatcattagcaccagaagtactttaattaataacaaccaatacaaataaggaggtgcccacatgcatatcaaaaaaggtgacaacgttaaagttatcgcaggtaaagacaaaggtaaagaaggtaaagtaattgctactctacctaaaaaagaccgtgtcgttgtggaaggtgttaacattatgaaaaaacaccaaaaaccaactcaattaaatcctgaaggtggaatcttagaaacagaggcagcaatccatgtttctaatgtacaattattggaccctaaaacaaacgaaccaactcgtgtaggttacaaatttgttgatggtaaaaaagttcgtatcgctaaaaaatctggcgaagaaattaaatctaataattaataacaagttgaaaggaggatcccactttgaaccgtttaaaagaaaagtttaacactgaagttactgaaaacttaatgaaaaaattcaattatagttcagtaatggaagtaccaaaaatagataaaatcgttgtgaacatgggtgtaggtgacgcagtacaaaattctaaagtattagacaatgctgttgaagaattagaattgatcactggtcaaaaaccattagtaactaaagctaaaaaatcaatcgcgactttccgtttacgtgaaggtatgccaatcggtgcgaaagtaacacttcgcggtgaaagaatgtatgaattcttagacaaattaatttcagtatcattaccacgtgtacgtgacttccaaggtgtttctaaaaaagcatttgacggacgcggtaactacactttaggtgttaaagaacaattaattttcccagaaatcgactatgataaagtaagtaaagttagaggaatggatattgttatcgtaacgactgctaacactgatgaagaagctcgtgaattgttagctaacttcggtatgccattccgtaaataattatttaaaggaggctaattaagtggctaaaacttcaatggttgctaagcaacaaaaaaaacaaaaatatgcagttcgtgaatacactcgttgtgaacgttgtggccgtccacattctgtatatcgtaaatttaaattatgccgtatttgtttccgtgaattagcttacaaaggccaaatccctggcgttcgtaaagctagctggtaataaaaaagagtctgaaaggaggcaacaatcaatgacaatgacagatccaatcgcagatatgcttactcgtgtaagaaacgcaaacatggtgcgtcacgagaagttagaattacctgcatcaaatattaaaaaagaaattgctgaaatcttaaagagtgaaggtttcattaaaaatgttgaatacgtagaagatgataaacaaggtgtacttcgtttattcttaaaatatggtcaaaacgatgagcgtgttatcacaggattaaaacgtatttcaaaaccaggtttacgtgtttatgcaaaagctagcgaaatgcctaaagtattaaatggtttaggtattgcattagtatcaacttctgaaggtgtaatcactgacaaagaagcaagaaaacgtaatgttggtggagaaattatcgcatacgtttggtaataaaaaataaggaggtgccataacatgagtcgtgttggtaagaaaattattgacatccctagtgacgtaacagtaacttttgatggaaatcatgtaactgttaaaggtcctaaaggtgaattatcaagaactttaaatgaaagaatgacattcaaacaagaagaaaacacaattgaagttgtaagaccatctgattctaaagaagatagaacaaaccatggtacaactcgtgctttattaaacaatatggtacaaggtgtttctcaaggatacgtaaaagtacttgaacttgttggtgtaggttaccgtgctcaaatgcaaggtaaagacttaatccttaacgttggttattctcacccagtagaaattaaagctgaagaaaacattactttctcagttgagaaaaacacagtcgttaaagttgaaggtatttcaaaagaacaagttggagcattagcatctaacatccgttcagtaagacctccagagccttacaaaggtaaaggtattcgttaccaaggtgaatacgttcgccgtaaagaaggtaaaactggtaaataatagataaactctaaagaaaggagtattgaaatgatcagtaaaattgataaaaataaagtgcgtttaaaaagacatgctcgtgttcgtactaacttatcaggtacagctgaaaagccacgtttaaacgtatatcgttcaaacaagcatatctacgctcaaattattgatgataataaaggcgtaacattagctcaagcttcttcaaaagacagcgacattgctactacagcaactaaagttgaattagcaactaaagtcggtgaagcaattgctaaaaaagctgctgacaaaggcattaaagaaatcgtatttgaccgtggaggatatttatatcacggacgtgttaaagcattagctgaagcagcaagagaaagcggattagaattttaatttaaaggagggacaaatacatggctcgtagagaagaagagacgaaagaatttgaagaacgcgttgttacaatcaaccgtgtagcaaaagttgtaaaaggtggtcgtcgtttccgtttcactgcattagttgtagttggagacaaaaatggtcgtgtaggtttcggtactggtaaagctcaagaggtaccagaagcaatcaaaaaagctgttgaagcagctaaaaaagatttagtagttgttccacgtgttgaaggtacaactccacacacaattactggccgttacggttcaggaagcgtatttatgaaaccggctgcacctggtacaggagttatcgctggtggtcctgttcgtgccgtacttgaattagcaggtatcactgatatcttaagtaaatcattaggatcaaacacaccaatcaacatggttcgtgctacaatcgatggtttacaaaaccttaaaaatgctgaagatgttgcgaaattacgtggcaaaacagtagaagaattatacaattaaggagggaaaactagttatggctaaattacaaattaccctcactcgtagtgttattggtcgtcctgaaacacaacgtaaaactgttgaagctttaggtcttaaaaagactaacagttcagtagttgttgaagataaccctgctattcgtgggcaaatcaacaaagttaagcacttagtaacagtagaagaaaaataatcaaggaggtgccgaaatgaaattacatgagttaaaaccggcagaaggttcacgtaaagaacgcaatcgtgttggacgtggtgttgcgacaggtaatggtaaaacaagtggtcgcggacacaaaggtcaaaaagctcgttcaggcggtggtgtaagaccaggatttgaaggtggtcaattaccattattccgtcgtttaccaaaacgtggttttactaacataaatcgtaaagaatatgctattgttaacttagaccaacttaataaatttgaagatggtactgaagtaactccagctttattagtagaatctggtgttgttaagaatgaaaaatctggtatcaaaatactaggtaatggttcacttgataagaaattgacagtgaaagctcataaattctcagcttcagcagcagaagctattgatgctaaaggtggagcacacgaggtgatctaatgattcaaacccttgtgaacttctttagaacaaaagaggttcgtaacaagattttcttcacactagcaatgttagtaatttttaaaatagggacttatataccagctccaggagtaaatcctgcagcttttgataatccccaaggttctcaaggtgccactgagttattaaatacttttggtggcggagccttgaaacgattttctatttttgcaatgggtattgtaccctacatcactgcatcaatcgtaatgcaattattacaaatggatattgtccctaaattctcagaatgggcaaaacaaggtgaagtaggtagaagaaagttaaataacgttactcgttatttagcaatttctttagcatttatccaatctataggtatggcattccaatttaataattatctcaaaggtgcgctgattatcaatcagtcaattatgagttatttattaatagcactagttttgacagcaggaactgctttcttaatatggcttggtgatcaaatcactcagttcggtgttggtaatggtatttctattatcatatttgcgggtattttatcaacgttgccagccagtctaattcaatttggacaaactgcgttcgttgggcaagaagatacatcattagcatggttgaaagtattaggacttttagtgtcactgatactattaactgtaggtgctatttatgtacttgaagccgttcgtaaaattccgattcaatatgctaagaaacaaactgctcaaagattaggttcacaggcaacttatctacctttaaaagtgaactcagccggtgttattcctgtaatctttgcaatggcgttcttcttactgcctagaacattaacgttgttctatccagataaagaatgggcacaaaacattgcgaatgctgcaaatccttcaagtaatgttggtatggttgtatatattgtactaattatactattcacatacttctatgcatttgtacaagttaatccggaaaaaatggctgataaccttaagaaacaaggtagctatgttccaggcattagacctggtgaacaaaccaaaaaatatattactaaagttttatatcgtttaacttttgtaggttctatcttcttagccgttatttcaattctaccaatattagcaactaagtttatgggattaccacaatcaattcagattggtggtacaagtttacttatcgttattggtgtagcgattgaaacaatgaaatctttagaagctcaagtatctcaaaaagaatataaaggctttggtggtagataattttaggagggcacttatgaatatcattttgatgggtttacctggcgcaggtaaaggaactcaagcaagtgaaattgtcaagaaattcccaataccccacatttcaactggtgacatgttcagaaaagctataaaagaagaaactgaattaggtaaagaagctaagtcttatatggaccgtggcgaattagttcctgatgaagtgactgtaggtatcgttaaggaaagaatttctgaagacgatgcaaaaaaaggctttttattagatggcttcccaagaacaatcgagcaagctgaggcattaaataatattatgtctgagcttgacagaaacattgatgctgtcatcaatatcgaagttccggaagaagaattaatgaaccgtcttacaggtcgtcgaatctgtgagtcatgtggtacaacgtatcatcttgtatttaatcctccgaaggtcgaaggtatttgtgatatcgatggtggtaaattgtatcaacgagaagatgataatcctgaaacggtagctaatcgtttgagtgttaatattaaacaatctaagcctattttagatttctatgatcaaaaaggtgtattgaaaaatattgatggttcaaaagatattagcgacgttaccaaagatgtcattgatattttagatcatttgtaatagatcaacttttagcggtctattttaagtgaggcatgatttaatcatattagatagatgagagtggcaattaacgataattaattcccgtaatttttgtttaacttataaaattaatcactgatagattcgtaacaataaagttgtctattgacgattaccttactattgcaaaaagggggaagttaatcaatggctaaacaagatgtaattgaattagaaggtactgtattagatactttaccgaacgcaatgtttaaagtagaattagaaaatggtcatgagattttagctcacgtaagtggtaaaatcagaatgaattacattcgtattctacctggcgacaaagtaactgttgagatgtctccgtacgatttaacacgcggaagaattacttatcgttataaataatcgtcactccataatatagggaggtataaaaatgaaagtaagaccatcagtaaaacctatttgcgaaaaatgtaaagtcattaaacgtaaaggtaaagtaatggtaatttgtgaaaatccaaaacacaaacaaagacaaggttaataaaagagaggtgtaaattaatatggcacgtattgcaggagtagatattccacgtgaaaaacgcgtagttatctcattaacttatatatacggtatcggtacgtcaactgctcaaaaaattcttgaagaagctaacgtatcagctgatactcgtgtgaaagatttaactgatgacgaattaggtcgcatccgtgaagttgtagacggttataaagtcgaaggtgacttacgtcgtgaaactaacttaaatatcaaacgtttaatggaaatttcatcataccgtggtatccgtcaccgtcgtggtttaccagttcgtggtcaaaaaacgaaaaacaacgcgcgtactcgtaaaggaccagttaaaacggtagctaacaagaaaaaataataggtaaaggaggcaaattttaaatggcacgtaaacaagtatctcgtaaacgtagagtgaaaaagaatattgaaaatggtgtagcacacatccgttcaacattcaacaacactattgtaactatcactgatgagttcggtaatgctttatcatggtcatcagctggtgcattaggattcaaaggatctaaaaaatcaacaccatttgcagcacaaatggcttctgaaactgcatctaaatcagctatggagcatggtttaaaaacagttgaagtaacagttaaaggacctggtccaggtcgtgaatcagctattcgtgcattacaatctgcaggtttagaagtaactgcgatcagagacgttactccagtacctcataacggttgtcgtccaccaaaacgtcgtcgtgtataatttatgatggtattgttacaggtcactgagcaaacattttaaattaagtcgacgtatataaggaggatatttaaatgatagaaatcgaaaaacctagaattgagacaattgaaattagtgaagatgctaaattcggtaagttcgttgttgaaccactagaacgtggctacggtactacactaggaaactccttacgtcgtatcctactatcttcattaccaggtgcagccgttaagtatattgaaattgagggagttttacatgaattctcagcagtagacaatgtagttgaagatgtttctacaattattatgaacattaaacaattagcattgaaaatttactctgaagaagataaaactttagaaattgatgtacgtgatgaaggcgaagtaacagcaagcgacattacacatgatagtgatgttgaaattttaaacccagagcttaaaattgcaacagtatctaaaggtggtcacttaaaaattcgtctagttgctaacaagggtagaggttacgcattagcagaacaaaataatactagtgatttaccaattggtgtaatccctgttgattcattgtattcacctgttgaacgtgtgaactatactgttgaaaatacacgtgtaggtcaaagcagtgattttgataaattaacattggatgtttggactaatggttcaatcacaccacaagaatcagtttcattagcagcaaaaataatgactgaacacttgaatatcttcgttggtcttactgatgaagcgcaaaacgctgaaatcatgattgaaaaagaagaagatcaaaaagaaaaagtattagaaatgtctattgaagaattagacttatctgtacgttcatataactgcttaaaacgcgcaggaatcaattctgttcaagagttagctgacaaatctgaagctgacatgatgaaagtgcgtaatttaggtcgtaaatctttagaagaagttaaatacaaattagaagatttaggattaggattaagaaaagaagattgataaaggaggttaactcatgggttacagaaaattaggtcgtacttctgatcaacgtaaagctatgttacgtgacttagctacatcacttattattagtgaacgtattgaaactacagaagctcgtgcaaaagaagttcgcagtgttgttgagaaattaatcactttaggtaaaaaaggagatttagcttctcgtcgtaatgcagctaaaactttacgtaatgttgaaatcttaaacgaagatgaaactacacaaactgcacttcaaaaattatttggtgaaatcgcagagcgttacacagaacgtcaaggtggttacactcgtatccttaaacaaggccctcgtcgcggtgacggtgctgaatcagtaattatcgaattagtataa

SEQ ID NO: 139 - DNA, 4663 bp, Staphylococcus aureus
atgcaaatggctagaaaagttgttgtagttgatgatgaaaaaccgattgctgatattttagaatttaacttaaaaaaagaaggatacgatgtgtactgtgcatacgatggtaatgatgcagtcgacttaatttatgaagaagaaccagacatcgtattactagatatcatgttacctggtcgtgatggtatggaagtatgtcgtgaagtgcgcaaaaaatacgaaatgccaataataatgcttactgctaaagattcagaaattgataaagtgcttggtttagaactaggtgcagatgactatgtaacgaaaccgtttagtacgcgtgaattaatcgcacgtgtgaaagcgaacttacgtcgtcattactcacaaccagcacaagacactggaaatgtaacgaatgaaatcacaattaaagatattgtgatttatccagacgcatattctattaaaaaacgtggcgaagatattgaattaacacatcgtgaatttgaattgttccattatttatcaaaacatatgggacaagtaatgacacgtgaacatttattacaaacagtatggggctatgattactttggcgatgtacgtacggtcgatgtaacgattcgtcgtttacgtgaaaagattgaagatgatccgtcacatcctgaatatattgtgacgcgtagaggcgttggatatttcctccaacaacatgagtagaggtcgaaacgaatgaagtggctaaaacaactacaatcccttcatactaaacttgtaattgtttatgtattactgattatcattggtatgcaaattatcgggctgtattttacaaataatcttgaaaaagagctgcttgataattttaagaagaatattacgcagtacgctaaacaattagaaattagtattgaaaaagtatatgacgaaaagggctccgtaaatgcacaaaaagatattcaaaatttattaagtgagtatgccaaccgtcaagaaattggagaaattcgttttatagataaagaccaaattattattgcgacgacgaagcagtctaaccgtagtctaatcaatcaaaaagcgaatgatagttctgtccaaaaagcactatcactaggacaatcaaacgatcatttaattttaaaagattatggcggtggtaaggaccgtgtctgggtatataatatcccagttaaagtcgataaaaaggtaattggtaatatttatatcgaatcaaaaattaatgacgtttataaccaattaaataatataaatcaaatattcattgttggtacagctatttcattattaatcacagtcatcctaggattctttatagcgcgaacgattaccaaaccaatcaccgatatgcgtaaccagacggtcgaaatgtccagaggtaactatacgcaacgtgtgaagatttatggtaatgatgaaattggcgaattagctttagcatttaataacttgtctaaacgtgtacaagaagcgcaggctaatactgaaagtgagaaacgtagactggactcagttatcacccatatgagtgatggtattattgcaacagaccgccgtggacgtattcgtatcgtcaatgatatggcactcaagatgcttggtatggcgaaagaagacatcatcggatattacatgttaagtgtattaagtcttgaagatgaatttaaacttgaagaaattcaagagaataatgatagttttttattagatttaaatgaagaagaaggtctaatcgcacgtgttaactttagtacgattgtgcaggaaacaggatttgtaactggttatatcgctgtgttacatgacgttactgaacaacaacaagttgaacgtgagcgtcgtgaatttgttgccaatgtatcacatgagttacgtacacctttaacttctatgaatagttacattgaagcacttgaagaaggtgcatggaaagatgaggaacttgcgccacaatttttatctgttacccgtgaagaaacagaacgaatgattcgactggtcaatgacttgctacagttatctaaaatggataatgagtctgatcaaatcaacaaagaaattatcgactttaacatgttcattaataaaattattaatcgacatgaaatgtctgcgaaagacacaacatttattcgagatattccgaaaaagacgattttcacagaatttgatcctgataaaatgacgcaagtattcgataatgtcattacaaatgcgatgaaatattctagaggcgataaacgtgtcgagttccacgtgaaacaaaatccactttataatcgaatgacgattcgtattaaagataatggcatcggtattcctatcaataaagtcgataagatattcgaccgattctatcgtgtagataaggcacgtacgcgtaaaatgggtggtactggattaggactagccatttcgaaagagattgtggaagcgcacaatggtcgtatttgggcaaacagtgtagaaggtcaaggtacatctatctttatcacacttccatgtgaagtcattgaagacggtgattgggatgaataataaggaacatattaaatctgtcattttagcgctactcgtcttgatgagtgtcgtattgacatatatggtatggaacttttctcctgatattgcaaatgtcgacaatacagatagtaagaagagtgaaacgaaacctttaacgacacctatgacagccaaaatggatacaactattacgccatttcagattattcattcgaaaaatgatcatccagaaggtacgattgcgacggtatctaatgtgaataaactgacgaaacctttgaaaaataaagaagtgaagtccgtggaacatgttcgtcgtgatcataacttgatgattccggatttaagcagtgattttacattattcgattttacgtatgatttaccgttatcaacatatcttggccaagtactgaacatgaatgcgaaagtaccaaatcatttcaatttcaatcgtttagtcatagatcatgatgctgatgataatatcgtgctttatgctataagtaaagaccgccacgattacgtaaaattaacaactacaacgaaaaatgatcattttttagatgcattagcagcagtgaaaaaagatatgcaaccatacacagatatcatcacaaacaaagatacaattgatcgtacgacgcatgtttttgcaccaagtaaacctgaaaagttaaaaacatatcgcatggtatttaacacgattagtgttgagaaaatgaatgctatactatttgacgattcaaccatcgttcgtagttcaaagagtggtgttacaacctacaacaataatacaggtgtcgcaaactataacgataaaaatgaaaaatatcattataaaaacctgtccgaagatgaagcaagttccagcaaaatggaagaaacgattccaggaacctttgattttattaatggtcatggtggtttcttaaacgaagacttcagattgtttagtacgaataatcagtcaggcgagttaacatatcaacgtttccttaacggttatccaacgtttaataaagaaggctctaatcaaattcaagtcacttggggtgaaaaaggcgtctttgattatcgtcgttcgttattgcgcaccgacgttgtgttaaatagtgaggataataaaacgttgccgaaattagagtctgtacgttcaagcttagcgaacaatagtgatattaattttgaaaaagtaacaaacatcgctatcggttacgaaatgcaggataactcagatcataatcacattgaagtgcagattaacagtgaactcgtaccgcgttggtatgtagaatatgatggtgaatggtatgtttataacgatgggaggcttgaataaatgaactggaaactgacaaagacacttttcattttcgtgtttattcttgtcaacatcgtgttagtatcgatttatgttaataaagtcaatcgctcacacattaatgaagttgagagtaacaatgaagttaattttcagcaagaagaaattaaagtaccggctagtatattgaataaatcagttaaaggtataaaattagagcaaattacagggcgatcaaaagactttagttctaaagctaagggcgattcggatttgaccacatcagatggtggaaaattattgaatgcgaacattagtcaatcggtaaaggtcagtgacaataacttaaaagatttgaaagattatgttaacaaacgtgtgttcaaaggttcagaatatcaattaagtgaaattaattctggttctgtaaaatacgaacaaacgtatgataatttcccgattttgaacaatagtaaagcgatgttgaactttaatatagaagataacaaagcggctagttataaacaatcaatgatggatgacattaagcccacagatggtgcagataagaagcatcaagttattggagtgagaaaagcaatcgaggcattatattataatcgttacttgaaaaaaggtgatgaagtcattaatgctagactcggttactactcagtcgtgaacgaaacgaatgttcaattgttacaaccaaactgggaaattaaagtgaagcatgacggtaaggacaaaacgaatacttactatgtcgaagcgacaaataataaccctaaaattattaatcattaa

SEQ ID NO: 140 - DNA, 2028 bp, Staphylococcus aureus
atggctttaaagatacggtatcaaactacatatgaaccgtttaaagtagttgatgatatcaaagagataccaaaagatgcgactattgtttggtatgattttgatgaaccgaatgaacaagaaaatgaatggtttaaagcacattttaattttaatgatttagaagtggatgatgcaattaacggtatgccacgagctaaatataaatcttataaagattatcaatacttagtatttcatagtattatggggtcaaactattcaccaatagcactaaatatttttatacaagacaatgtattagtaacatatcatcatcaaacgttggaatcattaaataaagtagtctataagtatatgaatacattagatgcagaattagattgtgcagatgtcgtcatattaattttagatatgatggttgataaatatttcaactttgtatatgcacttgaagatagtgtttatcattttgaagaccgccatgtagatgatcgctttaataaaatggtcatggatagtgtctttaagttacgttcggatttgattaaagtaaaacgtgtactgtttcctatgcaagagctaattgatacaatgaaacaaaatggtgatttgattatagataataaacattcgctatacattcaacatatcgatgaccacttgattaagcaacgtaatatcattcgtactgctcaagaaatgacaaacgaaatacgagaaaattttgagtcatacacgtcatttagaatgaatagtattatgcaagtattaacgttagtatcagttatattttcaccgttaacattcatagctgggatttatggtatgaactttgtaaatatgccggcattacatttacattatggatattatatttgcttagctgtaatgtttgttatagctgtcgtattaatcatctttttcagacgtaaaaaatggttttaaattagaaatgacgaaaaggtaggtttaatcatgagtgattttcaaagagaacagagaaaaaatgaacatgttgaaatagcaatggcccaatctgacgcaatgcattcagattttgataagatgcgttttgtgcatcattctatcccatcaattaatgtaaatgatatcgatttgacatcacagacgcctgacttaacgatggcatatccgatttatattaatgcaatgacgggtggtagcgagtggacgaaaaacatcaatgaaaagctagctgtagttgcaagagaaactcgcttagcgatggcagttggatcaacacatgcggcattgagaaatccacgcatggctgagacgtttacgattgcgcgaaaaatgaatcctgaaggcatgatttttagcaatgttggtgcggacgtaccagtagaaaaggctttggaagcagttgaattacttgaggcacaagcgttacaaatccatgttaattctcctcaagaattagttatgcctgaagggaatcgtgaatttgtgacttggttagataatatagcgtcgattgtatcacgagtgtctgttccagtcattataaaagaagttggatttggtatgagcaaagaattaatgcatgacttacaacaaataggcgtcaagtatgtcgatgttagtggcaaaggtggtactaactttgtagatattgaaaatgaacgtcgtgcaaataaagatatggattacttatcatcatggggacagtctacagttgagtcattacttgaaacaacggcttatcaaagcgaaatttcagttttcgcgagtggtggtttacgtacaccactcgatgcaattaaaagtttagcacttggtgcaaaggcaactggtatgtcacgtccgtttttaaatcaagttgaaaataatggcattgcacatacagtagcttatgtagaatcatttattgaacacatgaaatcaataatgacgatgttagatgctaaaaatattgacgacttaacacaaaaacaaatcgtatttagtccggaaataatgtcatggatagaacaacgtagcttgaatatacatcgaggataa

SEQ ID NO: 141 - DNA, 2384 bp, Staphylococcus aureus
atgaatcaaatcgaagaagcattaacgggtttgatttctaaagatcctgctattgttaacgaaaatgccaacaaagatagtgatacattttcaacaatgagagatttaacagcaggtatcgtttctaaatcttacgcattaaattatttattaccaaagcacgttgcagatgcacatcaaagaggggacatacattttcacgacttagattatcatccattccaaccgttaacaaactgttgtttaatagatgctaaaaatatgctacataatggatttgaaataggcaacgcgaatgtaacttcaccaaaatcaatacaaactgcatcagcgcagcttgtacaaattatagccaatgtttccagcagtcaatatggtggctgtacggttgaccgcgttgacgaattacttagtacatatgcacgacataatgaagaacaacatagaaatatcgcaaagcaatttgtcaaagaatctgaaattgatcgttatgttgatcaacaagtcactaaagacatcaatgatgcgattgaaagtctagaatatgaaattaataccttatatacatctaatggacagacaccttttgtaacattaggattcggcttaggtacagatcatttaagtcgcaaaattcaacaagctatcttaaatactcgtatcaaaggcttaggaaaagaccgcacgacagcgattttcccaaaacttgtattttcaattaaaaaaggaaccaactttagtccgcaagatccgaactatgacattaaacaactagcattaaagtgttcaacgaaacgtatgtatccagatattttaaattatgacaaactcgtagaaatattaggtgatttcaaagcgccaatgggttgtcgttcatttttaccaagttggaaagatgcggaaggtcattttgaaaataatggtcgttgtaatcttggtgttgttacacttaatttacctagaatggcattagaatctgccggtaatatgacgaaattctgggaaatcttttatgaacgtatcgatgtgttacatgatgcattactttatcgtataaatcgtttgaaagatgctgtaccgaataacgcaccaattttatataaaagtggcgcttttaactataaattaaaagaaacagatgatgttgctgagttatttaaaaataaacgtgcaacgatttcaatgggctatatagggttgtatgaaacagctactgttttctatggtccagactgggaaacatctcaagaagcaaaagcatttacgcttgaaattcttaaagaaatgaaacgttatcaaacgaaatggacagaattatatgacatttggttcagtatttacagtacgccgagtgaatcgctaacggatcgtttttgtcgtttagaccaagagagatttggagatattaaagacattacagataaaggatattatcaaaactctttccattatgatgtacgtaaagatgttacaccttttgaaaagttagattttgaaaaagattatccttattatgcgagtggtggtttcattcactattgtgagtatccgaaattgcaacacaatttgaaagcactagaagcggtatgggactactcttatgacaaagttggttacttaggtacaaatattccgattgatcattgttatgaatgtgattacgatggagattttgaagcaactgaaaaaggatttaaatgcccgaactgtggcaatgataatcctaaaacagttgatgtcgttaaacgaacatgtggttacttaggcaatccagttcaacgtccagtaattaaaggccgtcataaagaaatttgcgcacgagtaaaacatatgaaagcgcctaaagaatgacacttttagacattaaacaaggacaaggttatattgctaaaatagaatcaaatagctttgttgacggtgaaggagtaagatgcagtgtttatgtatcaggatgtccatttaattgtgttggatgttataacaaagcctcacaaaagttcagatatggcgagaaatacactgatgaaatattagcagaaatattagatgattgcgatcatgattatatatctgggctaagtctattaggtggcgaaccattttgtaatttggatattacattaaatcttgtcaaagcatttcgagcacgttttggaaatacaaagacaatttgggtatggactggatttttatatgaatatttagcaaatgattgtacagaacgtcgagagttattatcatacattgacgttttagtagatggtctatttatacaacacttattcaaacctgatttaccatataaaggttctttaaatcaacgcattatagatgtacaacaatcactctcgcatgcgcgtatgattgaatatatagttagttga

SEQ ID NO: 142 - DNA, 6624 bp, Staphylococcus aureus
atgaacggggataatcagcaaatactcagagaaattgtattgaatcctactattcatggtaaagaacttgaatcgatatttggtttgtctcgtagacaactaggatatcgcattcaaaaaatcaatttgtggcttgaacaagagggttatccaaaacttgaaagaacaagccaaggaaattttattgtaagttctgaaatcatgacgttattcaagcgagatgtatcggagcagcaaatgttaaacggcaacaatgtcatttttagcatagaaacacgtcgttattatttaatgctcatgctttttagtaaggaaaatgcaatgtctctaaaccatttttcaattgatttacaagtcagtaaaaatactgtcattcacgatataaatcatgtgaaagagcaattggaagatcatggtttgtcacttaagtattctcgaaagcatggttatgaaattgttggtgatgaatttgaagttcgccgtttcttcattaagttgattgatcaaaggttgaatcatgatattactaaaagtgaagttttaaaggcgctcaacttaacattcgaagatatcgcatatcaaaaagacaagatcaaacaggtagaacaatttttgaagagtcgctttatagacaaatcacttagttcattgccttatgtcctttgtgtgattcgtagacgaattcaaagtggtcatgtgatgaatccattaaatattaattatcagtatttgagggatacgaaagaatatcaagcaacggagattatgacgcaacatgagcctgatttgccagaagcggaaaagttatatttgacattacacttactttcaacaagtgtgcaatggactgatttgcaggaatcagataacatatcgaatttaacgatggccatcgctcaaatgattcaccattttgaacaaatcacttttattaacattgaagataaggagaaattatcacagcaactcttgttacatttaacgcctgctttttataggattaaatataacttaacggatcgtgatgaattaataaatcctttacaaggaaattatcaatccttatttcatatggtgaaacaatcatgtcaatcgttaactgaatatttcggaaaatcgttgcctgataatgaaatagcatatttaaccatgttgttcggaggtagtttgagacgtcaagatgaaaacttcgatggcaagataaaagctattatcgtgtgtacacaaggcacgtcagtatcacaaatgatgttatacgagttgcgaaacttatttccagaaattattttcttagatgcgatttcacttagaacatttgaaaattacacattagattatgacatcgtcttttcaccaatgtttgtcctaacacataaaaaattatttatcacaaaagtagctttatctgaaaatgagcaacgaaagttacgtaaagaagtgatgaagtacattaataaggaatcggctgacattgataaggaaataaacaagttaatggcattaattgaacgcacaacgacagttaatgacattacagaactacgtgatggtttagaagattttattgccaattataattcaatttcaaccattaatggatcgattgtcacacaaaataagacattagatttagctgacttgataccggcaaggcacgtgaaaagaatgcatcatgttgaaaatattgatgaagctattgctaaagcaagtgatgtgttagttgctaatcattttattgatattaaatatattcatgagatgcaacaggtatttgatgattcgtatatggttatcatgcaaaatattgctattccacatgcatactctgaaaagcatgtacataaaacagcgatgagtatgttgatattacaagaaccaatatacatgtcagatggcacagcaatccatattattgtacctattgctgctgttgataaagtgacacacttaagagcgttactacaattgagagatgtggcgcaagacaatgacgcaattaagcgcatcatacaaagtcgcaaaaattctgatgtaaatgagattttaaaaaattattcaaataaagaagcgagggaaaatggatgggacagcaattagtgcataaagaaaatataatgctcaatttgtcggcaactgataaagaatccgtattgtcacaaatgtcagatgtgttatttcaaaatgggttcgtgaagtcaacgtttaaagatgcagtcatcgacagagaaaaagaatttgctactggtttaccaacacatctatgttcggtcgctataccgcatacagatgtcgaacatattaaccatagaacgataggtgtggctgttctagaaaaagaggtgccgtttattgaaatgggaacacttgatcaacagacagaagtgaaaatcgtttttatgttagcgatggataaagtagatgatcaacttaagttgttacaacagttgatgcaaatttttcaaagtgaagaaaaattggagcagattctgcgaacgaaagatgaaacgattttagcaacactaatcaatgattatttggaatataactaaaaattaattggaggaattgaaaatgaaacaagtattagtagcgtgtggtgcaggtattgcaacgtcaacagtagtaaataatgcaattgaggaaatggcaaaggaacacaatattaaagtagatattaaacaaatcaaaattacagaagttggaccttatgaagacactgcagatttattagttacaactgcaatgacaaagaaagaatataaattcccagttatcaacgcacgtaatttcttaactggtattggtattgaagaaacaaaacaacaaatcttaacagagttacaaaaataacggaattgatatgtaacgtgggtcaataacatataaatatatgcaaattgcatataaatgactatcacgacaaatgattgttgatgacatagaaacgcagtgactgtaattcaaagggactgcagtcgaatgtagcaagggttgtcgttgaaatgaccgtaacgtcaaatgtaatcacaatcggaaagtatcgtgacaatgcatatataacagggagggtttaaatatgagttacttcactgattttgtaaggggatttttagatttaggtgcaactgttattttaccggttgtcatattcttgcttggcctattctttaggcagaaaattggagcggcatttaggtctggtttaacaataggtgtggcttttgtagggattttcttagtcatcgatttattagttaaaaatttagggccagcagcacaagcgatggttaaaaatttaggcgtcagtctgaatgtgattgatgtaggttggccagcaacatcatctatcgcttgggcatcatctgtcgcagcatttattattccactcggaatcatagttaacgttgtattgctagtaactaaagtgacaaagacgatgaatgtagatatttggaatttttggcattatacgtttacagcagcaatggtttatgccgtatcaggcagtatttggcaagcgttattagcagcagttattttccaagttatctgtttgaaagtagcagattggacagcaccgatgatgagtgagttctttgatttaccaggtgtatcgattgcgacaggaagcacgatttcttatgcaccaggtatttacttagttaaattgttacaaaaagtacccggtctgaataagttagatgctgatcctgaaacaattcaaaaacgttttggcgcatttggagagtctatatttgtcggcttaattttaggtttaggtattggtgtgttagcaggttacaaacctggagacatcattaatttaggaatgtcaatggctgcagtaatggtattaatgcctagaatggtaaaaatcttaatggaaggtttaatgccagtttcagagtctgcaagaacatggctaaataaacgttttggcgaacgtgaaatttatattggattggatgcggctgtagcattaggtcatccagcggttatttcgacagcattaattttagtacctatcactgttttattagccgttattttaccaggaaaccaagtactaccttttggtgacttagcaactataccatttgttgtcgcgtttattgttggtgcagcaagaggaaacattattcattctgtcattgtgggtacgattatgattgcaatttcattatatattgcaacagacgtagcacccattttcacagatatggcgaaaggtacgaatgtacaaatgccaaaaggttcatctgaaatttcaagtattgatcaaggtggtaatatcgttaactatcttatctttaaactatttagtctattcaattaaaaatcgaggtgtttgtggtgaaagctttagtaaaaacaagagaaggacatggcaacttagaacttcttgataaagaagttgcaacaccgctagatgataaagtaaagattaaagtacattatgcaggaatttgtggcacagacattcatacttatgaagggcattataaagttaattttccagtgacattaggtcatgaattttctggtgaaatcgttgaagttggagcagacgttaaagattttaaagttggtgaccgtgtcacttctgaaactacattctatgtttgtaatgagtgtgaatactgtaaatcaaaagactataatttatgcaaccatcgaaaaggtattggaacacaagttgatggcgtatttactaattatgtcattgcacgtgaagaaagtttgcatcatattccagacgaagtatcgtatcagtctgcagctatgacagaaccattagcatgtgcacatcatggcgtttctaagattcaagtgaactctggcgatgtagcagttgtaatgggacctgggccaatcggattacttgtagcacaagtgttgaaaagtaaaggcgcaactgttgtggtaactggattggacaatgacaaagtcagattagataaagcagaagcattgcacatggattatgtagtcaatttacaacaaacagacttaaaaacgtatatcaatggaattacagacggttacggtgcagatgttgttgttgaatgttcaggtgcagttccagcagcacgacaaggtttagatattatacgcaaaaaaggtttctacagtcaaataggtatttttaaggatgctgaaattccatttgatatggaaaaagtgattcaaaaagaaataacagttgttggtagtagaagtcaaaagccagcagattgggaaccttcattgcaacttatggcggatggtttagtaaatgctgaagctttggtgacaaaaatatatgatatttcgaaatgggacgaggcgtatcaacatttaaaatctggcgaaggtattaaagcattacttaagccgctcgatttagatgaaaatgaaggagagaattaatatggtagaatcaatgctaacttttatgcttgggccattaagacaaatcactgatttttatatggaacatttactcgtaagtaattccatcgtcattgcaggttattttgcgacaggtatttttaaaaagaaaaaagttgtgaattaaatcaaatttgaggtgatttacaagtgaaagcattgaaattatatggcgtagaagatttacggtatgaggataatgaaaagccagtcattgaaagtgcgaatgacgttattgttaaagtacgagcgactggcatatgtggttcagacacgtcacgatacaaaaaaatggggccatacattaaaggtatgccatttggtcatgaattttcaggtgtagtagatgccattggaagtgatgttacgcatgttaatgtgggcgacaaagtgacaggttgcccagcaataccttgttatcaatgcgagtattgtttgaaaggtgaatatgcacgatgtgaaaagttattcgtcattggctcatatgaacctggatcgttcgcggaatatgtcaaattgccagcgcaaaatgttttaaaggttccagacaatgttgattacattgaagcagcaatggttgagccatcagccgttgttgcgcatgggttttataaatcgaatatacaacctggtatgactgttgcagtaatggggtgtggcagtataggtttgttagctattcaatgggcacgaatatttggtgctgcacatatcatcgctatagatatagatgcgcataaactagatattgcaacatcattgggcgcacatcaaacaatcaattcaaaagaagaaaatcttgagaaattcatcgaaaatcattacgccaatcaaatcgatttagctatagaatcatcaggtgctaaagttacgattggtcaaatattgacgctacctaaaaaaggtggcgaggtggtattactcggaataccatatgatgatattgagattgatcgcgttcattttgaaaaaattctgcgtaacgagttgacagtatgtggctcttggaactgtttgtccagtaattttccgggcaaagagtggacggcaaccttacattatatgaagacgaaagatattaatgtaaagcctattatttctcattttttaccgttagaaaaaggcccggagacatttgataaattagttaacaagaaagaacgatttgataaagtcatgtttacgatttattag

SEQ ID NO: 143 - DNA, 2773 bp, Staphylococcus aureus
atgtcggaaaaagaaatttgggaaaaagtgcttgaaattgctcaagaaaaattatcagctgtaagttactcaactttcctaaaagatactgagctttacacgattaaagatggtgaagctatcgtattatcgagtattccttttaatgcaaattggttaaatcaacaatatgctgaaattatccaagcaatcttatttgatgttgtaggctatgaagttaaacctcactttattactactgaagaattagcaaattatagtaataatgaaactgctactccaaaagaaacaacaaaaccttctactgaaacaactgaggataatcatgtgcttggtagagagcaattcaatgcccataacacatttgacacttttgtaatcggacctggtaaccgctttccacatgcagcaagtttagctgtagccgaagcaccagccaaagcgtacaatccattatttatctatggaggggttggtttaggaaaaacccatttaatgcatgccattggtcatcatgttttagataataatccagatgccaaagtgatttacacatcaagtgaaaaattcacaaatgaatttattaaatcaattcgtgataacgaaggtgaagctttcagagaaagatatcgtaatatcgacgtcttattaatcgatgatattcagttcatacaaaataaagtacaaacacaagaagaatttttctatacttttaatgaattgcatcagaataacaagcaaatagttatttcgagtgatcgaccaccaaaggaaattgcacaattagaagaccgattacgttcacgctttgaatgggggctaattgttgatattacgccaccagattatgaaactcgaatggcaattttgcagaagaaaattgaagaagaaaaattagatattccaccagaagctttaaattatatagcaaatcaaattcaatctaatattcgtgaattagaaggtgcattaacacgtttacttgcatattcacaattattaggaaaaccaattacaactgaattaactgctgaagctttaaaagatatcattcaagcaccaaaatctaaaaagattaccatccaagatattcaaaaaattgtaggccagtactataatgttaggattgaagatttcagtgcaaaaaaacgtacaaagtcaattgcatatccgcgtcaaatagctatgtacttgtctagagagcttacagatttctcattacctaaaattggtgaagaatttggtgggcgtgatcatacgaccgtcattcatgctcatgaaaaaatatctaaagatttaaaagaagatcctatttttaaacaagaagtagagaatcttgaaaaagaaataagaaatgtataagtaggaaactttgggaaatgtaatctgttatataacagcactaataataactgtcattttttacatttctatatactaatgtgacaagatgagcaaaactcattttgtggataatgtttaaaagtcatacacaccatacacaagttatcaacatgtgtataacttcgccaaatctatgtttttacgacttatccaccaatccacagcacctactactattactaagaacttaaaacctatataattatatataaacgactggaaggagttttaattaatgatggaattcactattaaaagagattattttattacacaattaaatgacacattaaaagctatttcaccaagaacaacattacctatattaactggtatcaaaatcgatgcgaaagaacatgaagttatactaactggttcagactctgaaatttcaatagaaatcactattcctaaaactgtagatggcgaagatattgtcaatatttcagaaacaggctcagtagtacttcctggacgattctttgttgatattataaaaaaattacctggtaaagatgttaaattatctacaaatgaacaattccagacattaattacatcaggtcattctgaatttaatttaagtggcttagatccagatcaatatcctttattacctcaagtttctagagatgacgcaattcaattgtcggtaaaagtgcttaaaaacgtgattgcacaaacgaattttgcagtgtccacctcagaaacacgcccagtactaactggtgtgaactggcttatacaagaaaatgaattaatatgcacagcgactgactcacaccgcttggctgtaagaaagttgcagttagaagatgtttctgaaaacaaaaatgtcatcattccaggtaaggctttagctgaattaaataaaattatgtctgacaatgaagaagacattgatatcttctttgcttcaaaccaagttttatttaaagttggaaatgtgaactttatttctcgattattagaaggacattatcctgatacaacacgtttattccctgaaaactatgaaattaaattaagtatagacaatggggagttttatcatgcgattgatcgtgcctctttattagcacgtgaaggtggtaataacgttattaaattaagtacaggtgatgacgttgttgaattatcttctacatcaccagaaattggtactgtaaaagaagaagttgatgcaaacgatgttgaaggtggtagcctgaaaatttcattcaactctaaatatatgatggatgctttaaaagcaatcgataatgatgaggttgaagttgaattcttcggtacaatgaaaccatttattctaaaaccaaaaggtgacgactcggtaacgcaattaattttaccaatcagaacttactaa

SEQ ID NO: 144 - DNA, 3451 bp, Staphylococcus aureus
atgatttatgcaggtattttagcaggaggtattggttcgagaatggggaacgtgccattaccaaaacaatttttagatattgataataaaccgattttaatccatacaattgagaagttcattttagtgagtgaatttaatgagattattatcgcaacgccagcacagtggatttcccatacacaggatattttaaaaaaatataacattacagatcaacgtgtcaaagtagttgcaggtggtacggatcgaaacgaaacaattatgaacattatcgaccatattcgcaatgtaaatggaattaataatgatgatgtgattgtaactcatgatgccgtaagaccatttttaactcaacgtattattaaagagaacattgaagtagcagcaaaatatggtgcagtagatacagtcattgaagcaattgatacgattgtaatgtctaaagataaacagaacatacacagtatccctgtaaggaatgaaatgtatcaaggccaaacaccacaatcatttaatattaaattattacaagatagttatcgcgccttaagtagtgaacaaaaagaaatcttatcagatgcatgtaaaataattgtcgaatctggacatgcagttaaattggtacgtggagaactatacaacattaaagtgacaacaccgtatgatttaaaagtagcaaatgccattattcaaggtgatattgccgatgattaatcaagtatatcaactcgttgcaccgagacagttcgacgtcacatataataatgttgatatttatggtaatcatgtcatcgtaagacctttatacttgtctatttgtgcagctgatcaaaggtattacacaggtcgaagagatgaaaatgtactgcgcaaaaaattgccaatgtcattagttcatgaagctgttggtgaagttgtattcgatagtaaaggagtatttgaaaaaggtacgaaagtagtaatggtgccgaatacacctacagagcaacatcatattatcgcggagaattacttagcctctagttattttagatctagtggttatgatggttttatgcaagactacgttgtgatggcacatgatcgtatcgttccgctgcctaatgacattgatttgagtacgatttcatacacagagttagtgtcagtaagttatcatgctatacaacgatttgaacgtaaatctatacctttgaaaaacagctttggtatttggggtgatggtaacttaggttatattactgctattttgctacgtaagttgtacccagaagctaaaatttatgtatttggtaagacagactataaattaagtcatttttcatttgtagatgacatctttacagtaaatcaaataccagatgatcttaaaattgatcatgcatttgaatgtgttggaggtaaaggaagtcaagttgcacttcaacaaatagttgaacatatttcaccagaaggcagtattgctttgttaggcgtaagtgaattacccgtggaagtgaatacacgattagtacttgaaaaaggattaacgttgattggtagtagtcgaagcggctctaaagattttgagcaagttgttgatttatatcgtaagtacccagacatagttgaaaagttagcattattaaaaggacatgaaattaatgtatgtacgatgcaagatatcgtccaagcgtttgaaatggatttatcgacatcttggggaaaaacagtattgaaatggacgatttaataaaccgatgggggaataacaatgacaaaaacgaaacaagcaatacatattgataacatatactgggaacgtgttcagttatatattgaaggacatagtgaaggtgtcgatttaacatcaggacaatttgttctgaggaatttaaccgaaacaaaaacattagaagcaaatgaaatgaaaatagacggtaatacatttatatgtagattcaacgtcgcaatattagacgatgggtattatttaccaatggataaatatttatttgtttatcatgaccagttagagtatattggacaacttaatccaaatattattgatcaagcttatgcggcattaaatgaagagcaaattgaagaatacaatgagctgactacacaaaatggaaaagtgaactatttattagcgtatgatgctaaagttttccgtaaaggtggcgtatcacaacatacggtctataccattactccggaaatagcaagtgacgttaacgaatttgtatttgatattgaaatcaccttacctcaagagaaatcaggggtcattgcgacaagtgcacactggcttcataaacaaggtcataaagcttcatttgaaagtagaagtttcttatttaaagctatttttaatattacaaagttactacatattaaaagaagcaaaacaatattattcacatcagattcgcgtccgaatttatcagggaatttcaagtatgtatatgatgagttactacgccaaaaagtagattttgattatgatattaaaacggtatttaaggcgaatattacggatagacgcaaatggagagacaagtttagattgccatatttacttggtaaggccgattatatttttgttgatgatttccatccattaatttatacggttcgctttagaccatcacaagaaattattcaagtgtggcatgctgttggtgcctttaaaacagttggctttagtcgtacaggtaaaaaaggtggtccgtttatcgattcattaaaccatcgtagttacacgaaagcatatgtttcatcagaaaccgatattccattttatgctgaagcatttggaattagagaagaaaatgttgtaccaacaggtgtaccacgtactgatgtactatttgatgaagcttatgcaacacaaattaaacaagagatggaagatgaattgccaattataaaaggtaagaaagttattctattcgcaccgacatttagaggtaatggtcacggtacggcacattatccattttttaaaattgattttgaacgtttagcaagatactgcgagaagcataatgcagttgtgttattcaaaatgcatccgttcgtaaaaaatagacttaatatttcacgtgaacatagacaatactttatcgatgtgtcagatcatcgtgaagttaacgatattctctttgttacagacttgttgattagtgattattcatctttaatatatgaatatgcagtatttaaaaagccgatgattttctatgcatttgacttagaagattacattacgacgcgtgatttctatgaaccatatgaatcatttgttccaggtaaaattgtacaatcctttgatgcattaatggatgctttggacactgaagattatgaggttgaaaaagttgtaccattcttagataaacattttaaatatcaagatggtcgctcaagtgaacgtttagtcaaagatttgtttagacgctaa

SEQ ID NO: 145 - DNA, 3268 bp, Staphylococcus aureus
atgcgaagacacgcgataattttggcagcaggtaaaggcacaagaatgaaatctaaaaagtataaagtgctacacgaggttgctgggaaacctatggtcgaacatgtattggaaagtgtgaaaggctctggtgtcgatcaagttgtaaccatcgtaggacatggtgctgaaagtgtaaaaggacatttaggcgagcgttctttatacagttttcaagagaaacaactcggtactgcgcatgcagtgcaaatggcgaaatcacacttagaagacaaggaaggtacgacaatcgttgtatgtggtgacacaccgctcatcacaaaggaaacattagaaacattgattgcgcatcatgaggatgctaatgctcaagcaactgtattatctgcatcgattcaacaaccatatggatacggaagaatcgttcgaaatgcgtcaggtcgtttagaacgcatagttgaagagaaagatgcaacgcaagctgaaaaggatattaatgaaattagttcaggtatttttgcgtttaataataaaacgttgtttgaaaaattaacacaagtgaaaaatgataatgcgcaaggtgaatattacctccctgatgtattgtcgttaattttaaatgatggcggcatcgtagaagtgtatcgtaccaatgatgttgaagaaatcatgggtgtaaatgatcgtgtaatgcttagtcaggctgagaaggcgatgcaacgtcgtacgaatcattatcacatgctaaatggtgtgacaatcatcgatcctgacagcacttttattggtccagacgttacaattggtagtgatacagtcattgaaccaggcgtacgaattaatggtcgtacagaaattggcgaagatgttgttattggtcagtactctgaaattaacaatagtacgattgaaaatggtgcatgtattcaacagtctgttgttaatgatgctagcgtaggagctaatactaaggtcggaccgtttgcgcaattgagaccaggcgcgcaattaggtgcagatgttaaggttggaaattttgtagaaattaaaaaagcagatcttaaagatggtgccaaggtttcacatttaagttatattggcgatgctgtaattggcgaacgtactaatattggttgcggaacgattacagttaactatgatggtgaaaataaatttaaaactatcgtcggcaaagattcatttgtaggttgcaatgttaatttagtagcacctgtaacaattggtgatgatgtattggtggcagctggttccacaatcacagatgacgtaccaaatgacagtttagctgtggcaagagcaagacaaacaacaaaagaaggatataggaaataatcatttacgtatttaaaatggctaggataaaaggataatcctatgtaatattaatgtaatctttatgatttaatgattcgcatagtaatggagttacattttatatataatagtaattgcgtaagtaaataattggaggactataaatgttaaataatgaatataagaattcgtcattaaagattttttcattgaaaggaaacgaagcattagcgcaagaagttgctgaccaagtaggaattgaactaggtaaatgttcagttaaacgttttagtgatggagaaattcaaattaatatcgaagagagtattcgtggttgtgacgtatttattattcaaccaacatcatatcctgtgaatctacatttaatggaattattaattatgattgatgcttgtaaacgtgcttctgcagcaacaatcaatattgtagtgccatattatggatatgcaagacaagatagaaaagcccgtagccgtgagccaatcactgctaaattagttgcaaacttaatcgaaacagctggcgcaactcgtatgattgcgttagacttacatgcaccacaaattcaaggattctttgatattccaattgaccacttaatgggtgtgccaattcttgctaaacatttcaaagatgatccgaatattaacccagaagaatgtgtcgttgtttcaccagaccatggcggtgttacacgtgcacgtaaattagctgacattttaaaaactccaattgcaattatagataaacgtcgtcctagaccaaatgttgctgaagtgatgaacattgttggtgagattgaaggacgtacggcaattattattgacgatattattgatacagcaggtacaatcactttagctgcacaagcattaaaagataaaggtgctaaagaagtatatgcttgttgtacacaccctgttttatcaggaccggctaaagaacgtatcgaaaattctgctataaaagaattaatcgtaacaaactcaattcatttagatgaagatcgcaaaccatctaacactaaagaattatctgttgctggtttaatcgcacaagctatcattcgtgtatacgaaagagaatcagttagcgtattatttgactaatatttaaaaggcgtttgacgaacatattccaaacgtgtataatagtttcgttcgtgattatacgaataaataaacacttgcaagcaacgatgatgttgatgggtaagtgaggtgctcgttttgagcaaaaatgaaaggtggaaatgagaatggcttcattaaagtcaatcatccgtcaaggtaaacaaacacgttcagatcttaaacaattaagaaaatctggtaaagtaccagcagtagtatacggttacggtactaaaaacgtgtcagttaaagttgatgaagtagaattcatcaaagttatccgtgaagtaggtcgtaacggtgttatcgaattaggcgttggttctaaaactatcaaagttatggttgcagactaccaattcgatccacttaaaaaccaaattactcacattgacttcttagcaatcaatatgagtgaagaacgtactgttgaagtaccagttcaattagttggtgaagcagtaggcgctaaagaaggcggcgtagttgaacaaccattattcaacttagaagtaactgctactccagacaatattccagaagcaatcgaagtagacattactgaattaaacattaacgacagtttaactgttgctgatgttaaagtaactggcgacttcaaaatcgaaaacgattcagctgaatcagttgtaacagtagttgctccaactgaagaaccaactgaagaagaaatcgaagctatggaaggcgaacaacaaactgaagaaccagaagttgttggcgaaagcaaagaagacgaagaaaaaactgaagagtaa

SEQ ID NO: 146 - DNA, 4585 bp, Staphylococcus aureus
ttgattaaactatttttgcttaagttatactgggcacacttttcgactaaacaaattcatcaatttttaatggcatatcctaatgtaattaaagaggagggaagaaaaaaagatagttatttatgtgaatgggtgaatagggaagaaaatgttcttttattacgtaaatactatgcttttataaaacttgatcataacgatattattaaagaactgcagaaattaaaagtaagttacattacatatatggattctgaatacccagtgctattaaaagaaatatatcaatttccattacttcttttctataaagggaacatcaaattaataaataatatgcatcatttggcagtagtaggtgcaagagattctacaagttatacccaacagtctttagaatttttattatcaaatgataaaagcaaatatttaacaattgtttccggccttgctcaaggagctgatgcaatggcacatcaaatagctttaaaatacaatctccctacaattgcagttttagcctttggccatcaaacacattatcccaaaagtacattagcattaagaaataaaatagaagaaaaaggtttagttatatccgaatatccaccacatacaccaattgctaaatatagatttcctgagcgcaatagaattatcagcggtttgtcaaaaggggttttaattactgaggctaaggaacaaagtggcagtcacatcacgatagattttgcattagagcaaaatagaaatgtttatgttttacctggatctatgtttaatcctatgacaaaaggtaatttattacgtatccaagaaggtgctaaggtagtattaaacgctaatgatatatttgaagactactatatttaaaactaaaaataacgagttgcttcatatttcttttgttaccctttgtaatttattttttaataaaatctataaaaaatagacagggaaaatgatttgtttagatataaaacgttgacaaaagcaaaattaagcgtttatcatttatctttagtaattagattagcgagggggaaatgacattggcagataatttagtcattgttgaatcgcctgcaaaagcaaaaaccattgaaaagtatttaggtaagaaatataaagttatagcttcaatgggacacgtcagagacttaccaagaagtcaaatgggtgtcgacactgaagataattacgaaccaaaatatataacaatacgcggaaaaggtcctgttgtaaaagaattgaaaaaacatgcaaaaaaagcgaaaaacgtctttctcgcaagtgaccccgaccgtgaaggtgaagcaattgcttggcatttatcaaaaattttagagcttgaagattctaaagaaaatcgcgttgttttcaacgaaataactaaagacgctgttaaagaaagttttaaaaatcctagagaaattgaaatgaacttagtcgatgcacaacaagcgcgtcgaatattagatagattggttggctataacatctcgccagttctatggaaaaaagtgaaaaaaggtttgtcagcgggtcgagttcaatctgttgcacttcgtttagtcattgaccgtgaaaatgaaattcgaaactttaaaccagaagaatattggactattgaaggagaatttagatacaaaaaatcaaaattcaatgctaaattccttcattataaaaataaaccttttaaattaaaaacgaaaaaagatgttgagaaaattacagctgcactagatggagatcaattcgaaattacaaacgtgactaaaaaagaaaaaacgcgtaatccagcaaacccatttacaacttctacattacaacaagaggcggcacgtaaattaaactttaaagcaagaaaaacaatgatggtcgcacaacaattatatgaaggtatagatttgaaaaaacaaggtacgattggtttaataacatatatgagaaccgattctacacgtatttcagatactgccaaagctgaagcaaaacagtatataactgataaatacggtgaatcttacacttctaaacgtaaagcatcagggaaacaaggtgaccaagatgcccatgaggctattagaccttcaagtactatgcgtacgccagatgatatgaagtcatttttgacgaaagaccaataccgattatacaaattaatttgggaacgatttgttgctagtcaaatggctccagcaatacttgatacagtctcattagacataacacaaggtgacattaaatttagagcgaatggtcaaacaatcaagtttaaaggatttatgacactttatgtagaaactaaagatgatagtgatagcgaaaaggaaaataaactgcctaaattagagcaaggtgataaagtcacagcaactcaaattgaaccagctcaacactatacacaaccacctccaagatatactgaggcgagattagtaaaaacactagaagaattgaaaattgggcgaccatcaacttatgcaccgacaatagatacgattcaaaagcgtaactatgtcaaattagaaagtaagcgttttgttcctactgagttgggagaaatagttcatgaacaagtgaaagaatacttcccagagattattgatgtggaattcacagtgaatatggaaacgttacttgataagattgcagaaggcgacattacatggagaaaagtaatagacggtttctttagtagctttaaacaagatgttgaacgtgctgaagaagagatggaaaagattgaaatcaaagatgagccagccggtgaagactgtgaagtttgtggttctcctatggttataaaaatgggacgctatggtaagttcatggcttgctcaaacttcccggattgtcgtaatacaaaagcgatagttaagtctattggtgttaaatgtccaaaatgtaatgatggtgacgtcgtagaaagaaaatctaaaaagaatcgtgtcttttatggatgttcgaaatatcctgaatgcgactttatctcttgggataagccgattggaagagattgtccaaaatgtaaccaatatcttgttgaaaataaaaaaggcaagacaacacaagtaatatgttcaaattgcgattataaagaggcagcgcagaaataatatttttattccctagagacattttaagattgttaaatagaatcattagtgaatcttattttaaagatagtaatggattaatctaaataagtgcggataatataaacataacaacataattaaaagacataaatgacaataaaaggagtatagaaatgactcaaactgtaaatgtaataggtgctggtcttgccggttcagaagcggcatatcaattagctgaaagaggaattaaagttaatctaatagagatgagacctgttaaacaaacaccagcgcaccatactgataaatttgcggaacttgtatgttccaattcattacgcggaaatgctttaactaatggtgtgggtgttttaaaagaagaaatgagaagattgaattctataattattgaagcggctgataaggcacgagttccagctggtggtgcattagcagttgatagacacgatttttcaggttatattactgaaacacttaaaaatcatgaaaatatcacagttattaatgaagaaattaatgccattccagatggatacacaattatcgcaacaggaccacttactacagaaacccttgcgcaagaaatagtggacattactggtaaagatcaactttatttctatgatgcagctgctccaattattgaaaaagaatctattgatatggataaagtttacttaaagtcccgttatgataaaggtgaagctgcatatttaaactgtcctatgactgaggatgaatttaatcgcttttatgatgcagtattagaagctgaagttgcacctgtaaattcatttgaaaaagaaaaatatttcgagggttgtatgccttttgaagtaatggcagaacgcgggcgcaagacattactatttggaccaatgaaaccagtaggattagaagatccaaagactgggaaacgtccttatgcagtggttcaattaagacaagatgacgctgctggcacactctacaatattgtcggcttccaaacacatttaaaatggggagctcaaaaagaagtcattaaattaattccaggtttagagaatgttgatattgttagatatggtgtgatgcatagaaataccttcattaactcaccggacgtattaaacgaaaaatatgaattgatttcacaaccaaacatacagtttgcgggacaaatgactggtgttgaaggttatgtagaaagcgcagctagcggcttagttgcaggtatcaatcttgcgcataaaatattaggcaaaggtgaggtagtatttccgagagaaactatgattggaagtatggcttactatatttctcatgctaaaaacaataagaatttccaacctatgaatgctaacttcgggttattaccatctttagaaactagaattaaagataaaaaagaacgctatgaagcacaagctaatagagctttggattacttagaaaatttcaaaaaaactttataa

SEQ ID NO: 147 - DNA, 2796 bp, Staphylococcus aureus
atggcttttgaattaccaaaattaccatacgcatttgatgcattagaaccacattttgacaaagaaactatggaaattcaccatgacagacatcataacacgtatgttacgaaattaaatgctgcagtagaaggtacagatttagaatctaaatctattgaagaaattgttgctaatttagacagtgtaccagctaacatccaaactgctgtacgtaataatggcggtggacatttaaaccattcattattctgggagttactttcaccaaactcagaagaaaaaggtactgtagtagaaaaaattaaagaacaatggggttctttagaagaatttaaaaaagaatttgctgacaaagcagctgcacgctttggttcaggttgggcttggttagtcgtaaacaatggccagttagaaattgtgactacaccaaaccaagataatccattaactgagggtaaaacacctattttaggtttagacgtatgggaacacgcttattacctaaaatatcaaaacaaacgccctgactacattggcgcattttggaatgtagttaactgggaaaaagttgacgaattatataatgcaacaaaataaagtatgattacttgttcggtctcttaaatgagaccgttatttttttgtcaaaaagatagaaataatttctaaattcatatatgatttaaagtgaaagactttgaatagaggtaggtagttttgttaaaaagactaaaagaaaaatcaaatgatgaaatcgttcaaaatacaattaacaagagaattaactttatatttggtgtgattgtatttatttttgcagtactagtactacgtttaggttatttacaaatcgcacaaggctcacattataaacaaattataaaaaatgatgaaaacattacagtgaatgagtctgtgccaagaggtcgtattttagacagaaatgggaaagttttagttgataatgcttctaaaatggctattacatatactaggggtcgaaaaacaacacaatcggaaatgttggatacggctgaaaagttatcaaagctaatcaagatggatactaagaaaattacagaacgtgataagaaagatttctggattcagttgcatcctaaaaaagcaaaagcaatgatgacaaaagaacaagctatgttagcagatggaagtattaaacaagatcaatatgataaacaactgttatcgaaaatcggaaaatcacaattagatgaattgtcttctaaagatttacaagttttagctatttttcgagagatgaatgcaggaacagttttagatccacaaatgataaaaaatgaagatgtcagtgaaaaagagtatgcagcagtttctcagcaactttccaaattaccaggtgttaacacgtctatggattgggatagaaaatatccatatggcgatactttaagaggtatattcggagatgtatcgacacctgctgaaggtattccaaaagaattgacagaacattacttatccaaaggatattcacgcaatgatcgtgttggaaaatcttacctagaatatcaatatgaagatgtattgcgtggtaagaagaaagaaatgaaatacacaacggacaaatctggtaaagttacatcttcagaagtgttaaatcctggcgctcgcggtcaagatttgaaattaacgatcgatatagatcttcaaaaagaagtagaagcattattagataaacaaattaagaagcttcgcagccaaggtgcaaaagatatggataatgctatgatggttgtacaaaatcctaaaaatggagacattcttgcgcttgccggaaagcagattaataagagtggtaaaatgactgattatgacattggtacgtttacttctcaatttgcggttggatcttctgtaaaaggtggaacattattagctggttatcagaataaagctatcaaagttggagaaacaatggtcgatgaaccattacatttccaaggtggtttgacaaaacgatcatacttcaataaaaacgggcatgtatctattaatgataagcaagctttgatgcattcatcaaacgtatatatgtttaaaacagcattaaaattagcgggagacccttattattctggtatggctttaccttcagatataagttcacctgcccaaaagcttagaagaggattaaatcaagtaggcttaggtgtgaaaacagggatagatttaccaaatgaaacaagaggtcaaatcgaaccattaacaaataatccaggtaattatctagatttatcaattggtcaatatgatacctatacaccattacaattatcacaatatgtttcaactatagcgaatgatggttatagaatacagccacacattggattaacgattcatgaatcaactaataaagatgaggttggtccactcaagaagaaaattaatggcactgtcttgaacaaggttaataatactgaaaaggaaatcaaacaaattcaagaaggattcaaaatggcatttaatgataaagatggtactggatatgttagttttaaagatacagtagtacctactgctggtaaaacgggtaccgctgaagtgttccaaaacggagagccaagagttaactctacttatataggatacgcgccaattgatgatccaaaattagcgttttcaattgtatatacaaatcagcctgtaccaccaccatggttaacaggtggagacttaggtagagatgtaattaactactactttaagcagttaggtaaagatgataaaaataaagacaaagacaaataa

SEQ ID NO: 148 - DNA, 2076 bp, Staphylococcus aureus
ttgttaaaaagactaaaagaaaaatcaaatgatgaaatcgttcaaaatacaattaacaagagaattaactttatatttggtgtgattgtatttatttttgcagtactagtactacgtttaggttatttacaaatcgcacaaggctcacattataaacaaattataaaaaatgatgaaaacattacagtgaatgagtctgtgccaagaggtcgtattttagacagaaatgggaaagttttagttgataatgcttctaaaatggctattacatatactaggggtcgaaaaacaacacaatcggaaatgttggatacggctgaaaagttatcaaagctaatcaagatggatactaagaaaattacagaacgtgataagaaagatttctggattcagttgcatcctaaaaaagcaaaagcaatgatgacaaaagaacaagctatgttagcagatggaagtattaaacaagatcaatatgataaacaactgttatcgaaaatcggaaaatcacaattagatgaattgtcttctaaagatttacaagttttagctatttttcgagagatgaatgcaggaacagttttagatccacaaatgataaaaaatgaagatgtcagtgaaaaagagtatgcagcagtttctcagcaactttccaaattaccaggtgttaacacgtctatggattgggatagaaaatatccatatggcgatactttaagaggtatattcggagatgtatcgacacctgctgaaggtattccaaaagaattgacagaacattacttatccaaaggatattcacgcaatgatcgtgttggaaaatcttacctagaatatcaatatgaagatgtattgcgtggtaagaagaaagaaatgaaatacacaacggacaaatctggtaaagttacatcttcagaagtgttaaatcctggcgctcgcggtcaagatttgaaattaacgatcgatatagatcttcaaaaagaagtagaagcattattagataaacaaattaagaagcttcgcagccaaggtgcaaaagatatggataatgctatgatggttgtacaaaatcctaaaaatggagacattcttgcgcttgccggaaagcagattaataagagtggtaaaatgactgattatgacattggtacgtttacttctcaatttgcggttggatcttctgtaaaaggtggaacattattagctggttatcagaataaagctatcaaagttggagaaacaatggtcgatgaaccattacatttccaaggtggtttgacaaaacgatcatacttcaataaaaacgggcatgtatctattaatgataagcaagctttgatgcattcatcaaacgtatatatgtttaaaacagcattaaaattagcgggagacccttattattctggtatggctttaccttcagatataagttcacctgcccaaaagcttagaagaggattaaatcaagtaggcttaggtgtgaaaacagggatagatttaccaaatgaaacaagaggtcaaatcgaaccattaacaaataatccaggtaattatctagatttatcaattggtcaatatgatacctatacaccattacaattatcacaatatgtttcaactatagcgaatgatggttatagaatacagccacacattggattaacgattcatgaatcaactaataaagatgaggttggtccactcaagaagaaaattaatggcactgtcttgaacaaggttaataatactgaaaaggaaatcaaacaaattcaagaaggattcaaaatggcatttaatgataaagatggtactggatatgttagttttaaagatacagtagtacctactgctggtaaaacgggtaccgctgaagtgttccaaaacggagagccaagagttaactctacttatataggatacgcgccaattgatgatccaaaattagcgttttcaattgtatatacaaatcagcctgtaccaccaccatggttaacaggtggagacttaggtagagatgtaattaactactactttaagcagttaggtaaagatgataaaaataaagacaaagacaaataa

SEQ ID NO: 149 - DNA, 1311 bp, Staphylococcus aureus
atgacaacaattaacccaacaaactacacattattaaagaaacaagcagcaagccttattgaagatgaacatcatatgattgcgattttaagtaacatgtctgccttattaaatgataatctaaatcaaattaattgggttggcttttacttattggaacaaaatgaacttatacttggacctttccaaggacaccccgcttgtgtccacattccaattggaaaaggtgtatgcggtacagccgtttcagaacgtcgtacacaagttgtagctgatgtccatcaattcgaaggacatatcgcttgtgatgctaatagtaagtctgagattgtcgttccaattttcaaagatgataaaattatcggcgtcttagatatcgatgcccctataacggatcgatttgatgacaatgacaaagaacatcttgaagcaattgttaaaattattgaaaagcaactcgcataaaaggacatcagcattttcaataaagtgttgacagttagcaggaaaatgttacaataatctttgtgtgaattaacgaaagtagcagttgtatattattgagcgctatgttgttcccaatgcggacgtgtcacgtaactgtcgctataaggtgaagacacataaaacaatatatcttagtaagcatgcaacactcttttttgtttattcataacaacaaaaaagaattaaaggaggagtcttattatggctcgattcagaggttcaaactggaaaaaatctcgtcgtttaggtatctctttaagcggtactggtaaagaattagaaaaacgtccttacgcaccaggacaacatggtccaaaccaacgtaaaaaattatcagaatatggtttacaattacgtgaaaaacaaaaattacgttacttatatggaatgactgaaagacaattccgtaacacatttgacatcgctggtaaaaaattcggtgtacacggtgaaaacttcatgattttattagcaagtcgtttagacgctgttgtttattcattaggtttagctcgtactcgtcgtcaagcacgtcaattagttaaccacggtcatatcttagtagatggtaaacgtgttgatattccatcttattctgttaaacctggtcaaacaatttcagttcgtgaaaaatctcaaaaattaaacatcatcgttgaatcagttgaaatcaacaatttcgtacctgagtacttaaactttgatgctgacagcttaactggtactttcgtacgtttaccagaacgtagcgaattacctgctgaaattaacgaacaattaatcgttgagtactactcaagataa

SEQ ID NO: 150 - DNA, 5199 bp, Staphylococcus aureus
atgaaatacgctggtattctagctggaggtataggctcaagaatgggtaacgtacctttacctaaacaatttttagatttagacaacaaaccgattttaatccatacattagaaaaatttattttaattaatgattttgaaaaaattattatcgcgacgccacaacaatggatgacgcatacgaaagatacacttagaaaattcaaaatttctgatgaaagaattgaagtcattcaaggtggtagcgatcgtaacgatacaattatgaatatcgttaaacatattgaatcaacaaatggtattaacgatgacgatgtcattgtgacacatgatgcagttagaccatttttaacgcatcgtattattaaagaaaatattcaagctgctttagagtacggtgcagtagatacagtgattgatgctatagatacgattgttacatctaaagataatcaaacgattgatgcaattccagtgcgtaatgaaatgtaccaaggtcaaacacctcaatcgtttaatattaatttattaaaagaaagctatgcacagttgagtgatgagcaaaagagtattttatctgatgcttgtaagattattgtagaaacaaacaaaccggttcgacttgtaaaaggtgagttatataacattaaagtaacaacaccttacgatttaaaagtagcgaatgctattattcgaggtggtattgccgatgattaatcaagtatatcaattagttgcacctagacaatttgaagttacgtataacaacgtagatatttacagtgactatgtcattgtacgtcctttatatatgtcaatttgtgctgccgatcaaagatattatactggtagccgtgatgagaatgtcttatctcagaaattgccaatgtctttaattcatgaaggtgttggtgaggtcgtatttgacagtaaaggtgtgtttaataaaggtacaaaagtagttatggtaccgaatacgccgacagaaaaagacgatgtcattgctgaaaactatttaaaatcgagctacttcagatcaagtggacatgatgggtttatgcaagattttgtgttgctaaatcatgatagagctgtaccactacctgatgatattgatttaagtattatttcatatacagagcttgtaacagtaagtttgcatgctattcgtcgttttgaaaagaaatctatttcaaataaaaatacatttggtatttggggtgatggtaacttaggttacattacagccattttattacgtaaattatatccagagtctaaaatatatgtctttggtaaaacagattataaattgagtcacttctcatttgttgatgatgtcttctttattaataaaatacctgaaggcttaacatttgatcatgcatttgagtgcgttggtgggcgtggtagccaatcagcaataaatcaaatgattgattatatttcaccagaaggaagcattgcactgttaggtgtaagtgagttcccagtagaagttaatacacgtctagtattggaaaaaggactaacgttgattggtagtagtcgaagtggttcaaaagatttccaagatgttgtagacttatacattcaatacccagatattgtagataaattagcgttgttaaaaggtcaagaatatgaaattgcaacaattaatgatcttacagaagcttttgaagcagacctgtctacatcttggggtaaaacagtattaaaatggattatgtaaatagaaaaggatgaattaacgttggttaaaagtaagatatatatagataaaatctattgggaacgtgttcagttattcgttgaaggacatagtgaaaacctagatttagaagatagtaattttgtattaagaaatttaactgagacacgtacaatgaaggcgaatgatgtcaaaatagatgggaatcaattcgtttgtcgtttcaatgtagctatcttagataatggttattacttacctgaagataagtacttattagtgaatgagcaagaacttgattatattgcacagttaaacccagatgtgattaatgatgcatatcaaaatctaaagccagaacaagaagaagaatacaacgaattagaaacacaaaatggtaaaatcaatttcttattgcagacttacctaaaagaatttagaaaaggcggcatttcgaagaaaacggtttatactgttacacctgaaatttctagcgatgttaatgaatttgtccttgatgttgttgtaacgactccggaagttaaaagtatttatatcgttcgtaaatataaagaattacgtaagtatttccgcaaacaatcatttaatacaagacaatttatttttaaagcgatatttaatacgacgaaatttttccacttgaaaaaagggaatacggtgttgttcacatcagactctagaccaacgatgtctggaaactttgaatacatctataacgaaatgttacgtcaaaatttagataaaaagtatgatattcacactgtttttaaagcgaatattacagatagacgtggcatcatcgacaagtttagattgccatatttacttgggaaggcagactacatctttgttgatgactttcacccattgatttatacagtgcgttttagacgttctcaagaagttattcaagtatggcatgccgttggtgcctttaaaacagttggctttagtcgtactggtaaaaagggtggaccatttattgattcattaaatcatcgtagctatacaaaagcttatgtatcatctgaaaccgatattccattctacgctgaagcatttggtattaaagagaaaaatgtagtgcctacaggtgttccacgtactgatgtactatttgatgaagcttatgcgacacagatcaaacaagagatggaagatgaattaccaattattaaaggtaagaaagtcattcttttcgcaccaacatttagaggtagtggtcatggtacagcacattacccatttttcaaaattgatttcgaacgtttagcaagatattgcgaaaaaaataacgcggttgtattatttaaaatgcatccatttgtgaaaaatagacttaatattgcagacaaacataaacaatattttgttgacgtttctgactttagagaagttaatgatatactgttcataacagatttattaattagtgactattcatctttaatatatgaatatgcagtatttaaaaagccaatgattttctatgcatttgatttagaagattatattacgacgcgtgatttttatgaaccatatgaatcatttgttccaggtaaaattgtgcaatcatttgacgcattaatggacgccttggacaatgaagattatgaaggagaaaaagtcattccattcttagataaacattttaaatatcaagatggccgatcaagtgagcgtttagtcagaaatttatttggtagctaagtttatatagtagtcaaagtgggagaggtataatgatgaaattttcagtaatagttccaacatacaattcagaaaagtatataacagaattacttaatagccttgcgaaacaagattttccgaaaactgaatttgaagtggttgtagttgatgactgttcaacagatcaaacgttacaaatagttgaaaagtatcgcaataaattgaacttgaaagtaagtcaactcgaaacaaattctggtggtccaggtaaacctagaaatgtggcgttaaaacaagcagaaggtgaatttgtattatttgtggactccgatgactatataaacaaagagactttaaaggatgcagcagcatttattgatgaacatcactcagatgtcttattgattaaaatgaaaggtgttaatggtcgtggtgtaccacaatctatgtttaaagaaacagcacctgaagttactttgttaaattcaagaattatctatactttaagcccgactaaaatctatagaacagcattactaaaagataatgacatttattttccagaagaattaaagagtgcagaagatcaattatttacaatgaaagcatatttgaatgcaaatcgaatcagtgtgttaagtgataaagcgtattattatgctacaaagcgtgaaggtgaacatatgagtagtgcgtatgtttcacctgaagacttttacgaagtcatgagattgattgctgtagaaatattaaatgcagatttagaagaagctcataaagatcaaatcttagcagaatttttaaatcgtcattttagtttttctcgtacgaatggcttctcacttaaagttaaacttgaagagcaaccacaatggattaatgctctaggagactttatacaagcagttccagaacgtgtagatgcattggtgatgagtaaattacgaccattgttgcactacgcgagagcgaaagatatagacaactatagaactgtagaagaaagttaccgtcaaggtcaatactaccgttttgatattgtagatggtaaattaaacattcaattcaatgaaggcgaaccatactttgaaggcattgatatcgctaagccaaaagtgaaaatgacagcatttaaatttgataatcataaaattgttacagagctaacgttaaatgaatttatgattggcgaaggacattatgatgtcagacttaaattacattcacgaaacaagaagcacacaatgtatgtacctttaagtgtcaatgcgaataaacaatatcgttttaacattatgttagaagatattaaagcgtatttacctaaagaaaaaatttgggatgttttcttagaagtccaaataggtacggaagtatttgaagtgcgtgttggtaatcaacgtaataaatatgcatatactgcagaaacaagtgcattaattcatttaaataatgatttttatagattaacaccgtatttcacaaaagactttaataacatttcgttatactttacagctattacattaacggattcaatctcaatgaagttaaaaggtaaaaacaaaatcattttaactggtctggatcgtggttatgtatttgaagaaggtatggctagtgtcgtgctaaaagacgacatgattatgggaatgttaagccaaacgtcagaaaacgaagtggaaatcttacttagtaaagatattaagaagcgagacttcaaaaatattgttaagttaaacactgcacatatgacttactcgctaaaataa

SEQ ID NO: 151 - DNA, 612 bp, Staphylococcus aureus
atggtaaaacgtacttatcaaccaaataaacgtaaacatagtaaagttcatggtttcagaaaacgcatgagcacaaaaaatggccgtaaagttttagcgcgccgtcgtcgtaaaggccgtaaagttttatctgcataagatcactgactcatcagtgatcttttttttcgtttaaattaagaataaatagaaatttatgttataagctcaatagaagtttaaatatagcttcaaataaaaacgataaataagcgagtgatgttattggaaaaagcttaccgaattaaaaagaatgcagattttcagagaatatataaaaaaggtcattctgtagccaacagacaatttgttgtatacacttgtaataataaagaaatagaccattttcgcttaggtattagtgtttctaaaaaactaggtaatgcagtgttaagaaacaagattaaaagagcaatacgtgaaaatttcaaagtacataagtcgcatatattggccaaagatattattgtaatagcaagacagccagctaaagatatgacgactttacaaatacagaatagtcttgagcacgtacttaaaattgccaaagtttttaataaaaagattaagtaa

SEQ ID NO: 152 - DNA, 1115 bp, Staphylococcus aureus
atgagaacatatgaagttatgtacatcgtacgcccaaacattgaggaagatgctaaaaaagcgttagttgaacgtttcaacggtatcttagctactgaaggtgcagaagttttagaagcaaaagactggggtaaacgtcgcctagcttatgaaatcaatgatttcaaagatggcttctacaacatcgtacgtgttaaatctgataacaacaaagctactgacgaattccaacgtctagctaaaatcagtgacgatatcattcgttacatggttattcgtgaagacgaagacaagtaataattagagggggcgtttaaatgctaaatagagttgtattagtaggtcgtttaacgaaagatccggaatacagaaccactccctcaggtgtgagtgtagcgacattcactcttgcagtaaatcgtacgttcacgaatgctcaaggggagcgcgaagcagattttattaactgtgttgtttttagaagacaagcagataatgtaaataactatttatctaaaggtagtttagctggtgtagatggtcgcttacaatcccgtaattatgaaaatcaagaaggtcgtcgtgtgtttgttactgaagttgtgtgtgatagcgttcaattccttgaacctaaaaatgcgcaacaaaatggtggccaacgtcaacaaaatgaattccaagattacggtcaaggattcggtggtcaacaatcaggacaaaacaattcgtacaataattcatcaaacacgaaacaatctgataatccatttgcaaatgcaaacggaccgattgatataagtgatgatgacttaccattctaataaaaattaacgaaattaaagcgaaaaaattatcaaaggaggcacacaatcatggcaggtggaccaagaagaggcggacgtcgtcgtaaaaaagtatgctatttcacagcaaatggtattacacatatcgactacaaagacactgaattattaaaacgttttatctcagaacgcggtaaaattttaccacgtcgtgtaactggtacttcagctaaatatcaacgtatgttgactacagctatcaaacgttctcgtcatatggcattattaccatatgttaaagaagaacaataa

SEQ ID NO: 153 - DNA, 1278 bp, Staphylococcus aureus
atgcaaagtttagataagaatttccgacatttatctcgtcaacaaaagttacaacaattggtagataagcaatggttatcagaagatcaattcgacattttattgaatcatccattaattgatgaggaagtagcaaatagtttaattgaaaatgtcatcgcgcaaggtgcattacccgttggattattaccgaatatcattgtggacgataaggcatatgttgtacctatgatggtggaagagccttcagttgtcgctgcagctagttatggtgcaaagctagtgaatcagactggcggatttaaaacggtatcttctgaacgtattatgataggtcaaatcgtctttgatggcgttgacgatactgaaaaattatcagcagacattaaagctttagaaaagcaaattcataaaattgcggatgaggcatatccttctattaaagcgcgtggtggtggttaccaacgtatagctattgatacatttcctgagcaacagttactatctttaaaagtatttgttgatacgaaagatgctatgggcgctaatatgcttaatacgattttagaggccataactgcatttttaaaaaatgaatctccacaaagcgacattttaatgagtattttatccaatcatgcaacagcgtccgttgttaaagttcaaggcgaaattgacgttaaagatttagcaaggggcgagagaactggagaagaggttgccaaacgaatggaacgtgcttctgtattggcacaagttgatattcatcgtgctgcaacacataataaaggtgttatgaatggcatacatgccgttgttttagcaacaggaaatgatacgcgtggtgcagaagcaagtgcgcatgcatacgcgagtcgtgacggacagtatcgtggtattgcaacatggagatacgatcaaaaacgtcaacgtttaattggtacaatagaagtgcctatgacattggcaatcgttggcggtggtacaaaagtattaccaattgctaaagcttctttagaattgctaaatgtagattcagcacaagaattaggtcatgtagttgctgccgttggtttagcacagaactttgcagcatgtcgcgcgctcgtttccgaaggtatccagcaaggccatatgagcttgcaatataaatctttagctattgttgtaggtgcaaaaggtgatgaaattgcgcaagtagctgaagcattgaagcaagaaccccgtgcgaatacacaagtagctgaacgcattttacaagaaattagacaacaatag

SEQ ID NO: 154 - DNA, 957 bp, Staphylococcus aureus
atgaactatcaagttcttttatattataaatatacgacgattgatgaccctgaacagtttgctcaggatcacttagcgttttgcaaagcacaccatttaaaaggtagaattcttgtttctacagaaggtattaacggcacattatctggtacaaaagaagaaaccgaacaatatatggcacatatgcatgccgatgaacgattcaaagatatggtgtttaaaattgatgaagctgaaggacatgcttttaagaaaatgcatgtacgtcctcgaaaagaaatcgttgctttagatttagaagatgacgtcgatccaagacacacaactggccaatatttatcacctgtagaatttagaaaagctcttgaagatgatgacacagtcattattgatgcacgtaatgattatgaatttgatttaggtcatttccgaggtgcaattcgcccagacatcacacgctttagagatttacctgactggattaaagagaataaagcgttatttacagataaaaaagtggttacgtactgtacaggtggcattcgatgtgaaaaattttctggatggcttttaaaagaaggtttcgaagatgtagcgcagcttcacggcggtatagctacatatggtaaagaccctgaaacaaaaggtcaatattgggacggtaaaatgtatgtatttgatgatcgtatcagtgttgatatcaaccaagttgaaaaaacaattattggtaaggattggtttgatggcaaaccatgtgaacgttatattaattgcgctaacccagaatgtaataaacaaatattagtttctgaagaaaacgaaactaaatatttaggtgcatgctcttatgaatgtgctaaacatgagcgtaatcgttatgttcaagcaaataatattagtgataatgagtggcaacaacgtttaacaaactttgatgatttacatcaacatgcttag

SEQ ID NO: 155 - DNA, 2079 bp, Staphylococcus aureus
atggcactattagaagcatttttaatttttatttttgctgtgattattagttcggttatcaataatcgattcccacaaattcctactgcctttattcaaattgcattaggtgtcgttattttcattattccaatacaagttgatttccaattcaattctgaagtgtttatgtttgccgttatcgcgccactactttttgtagaaggtacccacgtctctcgaacaaaattattagaatatcgtaaacctatactattaatgtcaatggcactagtgtttgcaactgtagtcggtgttggctattttatacattggatttggcctgccttaccaatgccagccgcttttgcaatagcagcaattttatgtcctactgatgcagtagcagtatctgctattacacgcggaaaattattacctaaaggttctatgacgattttagaaggtgaatctttactcaatgatgcagcaggtatcatttcatttaaaattgctgttactgcattagtaactggtaccttttcattattccaagctgttgaacaatttatcatttcaacaatactaggtgtacttattggtgcaattattggattcgttgtcgttagaatacgtatagacttaaccgctaataaaggtttaaaagataacaataccttaacttttattcaattattaactccttttgtcgtatactttttagcagaagaagttcatgcttcaggtatcattgcagttgtaatcgcaggtctaatccatggtttagaacgcgaccgtttaattagagcacaaacggaactacaaatgaattaccatcaaatttggaacacatttagttatgccttaaatggttttgtatttgttgtattaggttttatgattcctactgtagtcatagatattttccaaacagagcctgacaacttttcatttttaatagtgatcactatattaatcgctattgcaatttatgcatgtcgatttgtttgggtttatttctggtacaaagatttttatttcccgaaaaatatacaatcttatctagacgaagaacatgattcacatgaaacaccaccttctcgtgtgcgttacgcatttattatgacgatgtgtggtattcacggtacaatttcactttcaatggcacttacattaccatttatcattacaaaaggacaagcattcgaataccgtaatgatttattgtttattgcatctttcatggtattaattagtttaatcttagcgcaaattgttttacctttaattacaccatctgccgaagatactacttttaaaggtatgacttatcaatctgccaaaattttcattgttcaaaaagtgatacagcattttaaaaacgaaagtaaaaaagacaaaaacgatacaaattatcgcccagtattaaaccaatactatggagaattgttatttttattaaattcagaacctaataatcaaaatacaaaagaactcaaacgtttagaagatattgcaaaagtaatcgaaacatctacacttgagcgtttaattgataaaggtaaggcaacgtatcaggatattaataattaccgcaatattgtcgaattaacagagacacaccgtactgcatcatttgttgaaaaatttgcaaacttcttcaagatgttatggcttagacttaaagcgatgaagcactacaaagccttaaacaaagaatctaagaagcaagaatttgaaaattcattcaaagatgttcaaaaaattatgcgtattgtgaatcacaatattattttacgcttaaaagaagaacaaaatagtacaaatgtacttgaggttagcttagtcattaatcattactatgatatgagtcgctcattaaagtggcgtgcacaacgtcgaaaagaacgtcaagaaaacagcaatcaaatcataccgcaagctatgttccataaccacaaattggaagcattgtacttacaacgtcaccttttagatgaattaattcgcaaaaataaaatcaacaatatcgttgcagctcaaattcgagaaaatatcaattacaacgaaattgtcttgtctttacagtccaaacattaa

SEQ ID NO: 156 - DNA, 1203 bp, Staphylococcus aureus
atgaattattcatctcgtcaacagccggataagcattggcttcgcaaagtagactgggtattagtagccactatagctgttttagcaattttcagtgttctgcttattaactcggcaatgggcggtggtcaatacagtgctaatttcggtatcagacaaattttttattacattttaggtgcaatttttgcaggtatcatcatgtttatttcacctaaaaagattaaacattatacatatttattgtatttcttaatctgtctattattaataggcttgctcgttattcctgagtcacctattacacctattatcaatggtgccaaaagttggtacacgtttggccctatcagtattcagccatctgaattcatgaaaattattttaattttagcattagcgcgtgtcgtttctagacataatcaattcacattcaataaatcattccaaagtgatttgttattatttttcaaaattattggtgtctcgttagtaccaagtattttaatattactgcaaaatgacctaggaactacattagtattagctgctattattgcaggtgtgatgttagtaagtggtataacatggcgtatcttagcacctatctttattacaggtattgttggtgcaatgacagtcattttaggtattctatatgcacccgcattaattgaaaatttattaggtgtccaactgtatcaaatgggacgaatcaattcatggcttgacccctatacatatagtagtggtgatggctatcatttaactgaatcacttaaagctatcggttctggacagttactaggtaaaggatacaatcacggtgaagtttatatacctgaaaatcatactgactttatcttttcagtgattggagaggaacttggctttatcggttctgtcatattgatcttaatatttttatttttaatcttccatctaataagattagctgcgaaaattgaagatcaatttaacaaaatctttatcgttggtttcgtcactttacttgtgttccatattttacaaaatattggtatgacaattcagttgttaccaatcactggtattccattaccatttattagttatggtggtagtgcgctatggagtatgatgactggaataggtatagtcttatcaatttattatcatgaaccaaaacgatatgtcgatttataccatccaaaaagtaattaa

SEQ ID NO: 157 - DNA, 861 bp, Staphylococcus aureus
atgcctttagtttcaatgaaagaaatgttaattgatgcaaaagaaaatggttatgcggtaggtcaatacaatattaataacctagaattcactcaagcaattttagaagcgtcacaagaagaaaatgcacctgtaattttaggtgtttctgaaggtgctgctcgttacatgagcggtttctacacaattgttaaaatggttgaagggttaatgcatgacttaaacatcactattcctgtagcaatccatttagaccatggttcaagctttgaaaaatgtaaagaagctatcgatgctggtttcacatcagtaatgatcgatgcttcacacagcccattcgaagaaaacgtagcaacaactaaaaaagttgttgaatacgctcatgaaaaaggtgtttctgtagaagctgaattaggtactgttggtggacaagaagatgatgttgtagcagacggcatcatttatgctgatcctaaagaatgtcaagaactagttgaaaaaactggtattgatgcattagcgccagcattaggttcagttcatggtccatacaaaggtgaaccaaaattaggatttaaagaaatggaagaaatcggtttatctacaggtttaccattagtattacacggtggtactggtatcccgactaaagatatccaaaaagcaattccatttggtacagctaaaattaacgtaaacactgaaaaccaaatcgcttcagcaaaagcagttcgtgacgttttaaataacgacaaagaagtttacgatcctcgtaaatacttaggacctgcacgtgaagccatcaaagaaacagttaaaggtaaaattaaagagttcggtacttcaaaccgcgctaaataa

SEQ ID NO: 158 - DNA, 531 bp, Staphylococcus aureus
atgaaaattcaagattatacaaaacaaatggttgatgaaaaatcatttattgatatggcttatacattattgaatgataaaggcgaaactatgaacttatatgatatcatcgatgagtttagagcgttaggtgattatgagtacgaagaaattgaaaatcgcgttgtacaattttacacagatttaaacacagatggtcgttttttaaatgttggagaaaatttatggggattacgtgattggtattcggtagatgatattgaagagaaaatcgcaccaactattcaaaaattcgatattctggatgcagatgatgaagaagatcaaaacttaaaattattgggcgaagatgaaatggatgacgacgatgatattccagctcaaacagatgatcaagaagaactaaatgatccagaagatgagcaggttgaagaagaaatcaatcattcggatatagtcattgaagaagatgaagatgaactagacgaagacgaagaagtgtttgaagacgaagaagacttcaacgattaa

SEQ ID NO: 159 - DNA, 1806 bp, Staphylococcus aureus
atgtgtggaattgttggttatattggctatgataatgccaaagaattattattaaaaggtttagaaaaattagaatacagaggttatgactctgcaggtatcgcggtagtaaatgatgataatacaactgtatttaaagaaaaaggtcgtattgcagaattacgtaaagttgctgatagtagcgattttgatggacctgttggaatcggtcacacacgttgggcaacacacggtgtaccgaatcatgaaaactctcatccacatcaatcatcaaatggccgttttactctagttcataacggtgttattgaaaactatgaagagttaaaaggtgaatacttacaaggtgtatcattcatttcagaaacagatacagaagttatcgttcaattagttgaatacttttcaaatcaaggactttcaactgaagaagcatttacaaaagttgtgtcattattacatggttcatatgcattaggtttattagatgctgaagacaaagacacaatctatgttgctaaaaataaatcaccattattattaggtgttggtgaaggtttcaatgttatcgcatcagacgcacttgcaatgttacaagtgacaagcgaatataaagaaatccatgaccatgaaatcgttattgttaaaaaagatgaagttattattaaagatgcagatggaaacgttgtagaacgtgattcatatattgctgaaattgatgcatcagatgctgaaaaaggtgtttatgcacactacatgttaaaagaaattcatgaacaaccagcagtaatgcgtcgtattattcaagaatatcaagatgcagaaggtaacttgaaaattgatcaagacatcatcaatgatgttaaagaagcagaccgcatttacgttattgcagcaggtacaagctaccatgcaggtttagtaggtaaagaatttttagaaaaatgggctggcgtaccaactgaagtacacgttgcatcagagtttgtctacaacatgccattattatctgaaaaaccattgttcgtttatatttctcaatcaggtgaaacagcagatagccgtgcagtattagttgaaactaataaattaggtcataaatcattaacaatcactaatgttgcaggttcaactttatcacgtgaagcagaccacacattgttattacatgcgggtcctgaaatcgcagttgcatctacaaaagcatatactgcacaaattgcagtattatcaatcttgtctcaaatcgttgcaaaagagcacggtcgtgaagcagatattgatttattgagagaattagcaaaagtaacaacagcaatagaagcaattgttgacgatgcaccaattatggaacaaattgcaacagatttcttagaaacaacacgcaatgcattctttatcggacgtactattgactataacgtaagtttagaaggtgcgttaaaacttaaagaaatttcttacattcaagcagaaggttttgctggtggcgaacttaaacatggtacgattgcattaatcgaagatggcacaccagttgttgctttagcaactcaagaaaacgttaatttatcaattcgtggtaacgttaaagaagtagtagcacgtggtgcacatccatgtattatttctatggagggtcttgaaaaagaaggcgacacttatgtcattcctcatgtacatgaattattgacaccattagtttcagtagttgcattacaattgatttcatattatgcagcattacacagagatttagatgtggataaaccacgtaaccttgctaaatcagttactgtagaataa

SEQ ID NO: 160 - DNA, 2136 bp, Staphylococcus aureus
atgaaatctttaatattagctgaaaaaccatcagttgcaagagatattgctgatgctttacaaataaatcagaagcgtaatggttactttgaaaataaccaatatattgtcacgtgggcgttaggtcatctagtgacaaatgcgacacctgaacaatacgataaaaatttaaaggaatggcgattagaagaccttccaattatacctaaatatatgaaaactgttgttattggtaaaacaagcaaacaatttaaaacagtaaaagcgttaattttagataataaagtgaaagatattattattgcaacagatgctggacgagaaggtgaactagttgcaagattgattttggataaagttggtaacaaaaagccaatccgtcgattatggattagctcagttactaaaaaagctattcaacaaggttttaaaaatttaaaagacggtcgtcaatataacgatttgtattatgcagcgttagcgagaagcgaggcagattggattgttgggattaatgcaacgcgtgcactaacaacaaagtatgatgcacagctatccctgggacgtgttcagacaccaacgattcaattagtaaatacacgacaacaagagattaatcagttcaaaccacaacaatactttacattatcattaacggtaaaagggtttgattttcagctagaatcaaatcagcgatataccaataaagaaactttagaacagatggttaataatttgaaaaatgtcgatggtaagattaaatctgttgctactaaacataagaagtcgtatccgcaatcactgtacaatttaacagatttacaacaagatatgtatagacgttataaaattggacctaaagaaacattgaatacacttcaaagcttatatgagagacataaagtcgtaacctatccaagaacagattcaaactatttaacaactgatatggtagatactatgaaagaacgtattcaggcgacgatggcaacaacatataaagaccaagcacgcccattaatgtctaaaacattttcatcaaaaatgtcgatatttaataatcaaaaagtatctgatcaccatgcaattattcctacagaagtgagacctgtcatgtcagacttaagtaatagagaattaaagttatacgatatgattgtcgagcgttttttagaagctttaatgcctccgcacgagtatgacgcgataactgtaactttagaggttgcagggcacacatttgttttgaaagagaatgtaacaactgttttaggttttaaatctattagacaaggtgaatctattacagagatgcaacagcctttttcagaaggcgatgaagtgaagatttcaaaaacaaacattagagaacatgaaacaacacctccagaatattttaatgaaggttcgttattaaaagcgatggagaaccctcagaactttattcaattgaaggataaaaaatatgcgcaaactttaaaacaaacaggtggtatcggcacagttgcaacaagggccgacattatcgataaattatttaatatgaatgccattgaatcaagagacggtaaaattaaagtaacgtcaaaaggtaaacaaatattagaattagcaccagaagaattaacgtcgccacttttaactgcacaatgggaagaaaaattacttttaattgaacgtggtaaatatcaggcgaaaacatttattaatgaaatgaaagattttacgaaagatgttgtaaatgggattaaaaatagtgatcgtaaatataaacacgataatttaacaaccacagaatgcccaacgtgtggtaaattcatgattaaagttaaaactaaaaatggtcagatgcttgtgtgccaagatccatcttgtaagacgaaaaagaatgtacagcgcaaaacaaatgcaagatgtccaaactgtaaaaagaaattaacgttgtttggtaaagggaaagaagcggtatatcgttgtgtttgtggacattctgaaacgcaagcacatatggatcagcgtatgaagtctaaatcctctggtaaagtatctcgtaaagaaatgaaaaagtatatgaataaaaatgaaggtttagacaataatccgtttaaagatgcattaaagaacttgaatttatag

SEQ ID NO: 161 - DNA, 1266 bp, Staphylococcus aureus
atggaaaagatgcatatcactaatcaggaacatgacgcatttgttaaatctcacccaaatggagatttattacaattaacgaaatgggcagaaacaaagaaattaactggatggtacgcgcgaagaatcgctgtaggtcgtgacggtgaagttcagggtgttgcgcaattactttttaaaaaagtacctaaattaccgtatacgctatgttatatttcacgtggttttgttgttgattatagtaataaagaagcgttaaatgcattgttagacagtgcaaaagaaattgctaaagctgagaaagcgtatgcaattaaaatcgatcctgatgttgaagttgataaaggtacagatgctttgcaaaatttgaaagcgcttggttttaaacataaaggatttaaagaaggtttatcaaaagactacatccaaccacgtatgactatgattacaccaattgataaaaatgatgatgagttattaaatagttttgaacgccgaaatcgttcaaaagtgcgcttggctttaaagcgaggtacgacagtagaacgatctgatagagaaggtttaaaaacatttgctgaattaatgaaaatcactggggaacgcgatggcttcttaacgcgtgatattagttactttgaaaatatttatgatgcgttgcatgaagatggagatgctgaactatttttagtaaagttggacccaaaagaaaatatagcgaaagtaaatcaagaattgaatgaacttcatgccgaaatagctaaatggcagcagaagatggaaacatctgaaaagcaagctaaaaaagcgcaaaatatgattaatgatgcgcaaaataaaattgctaaaaatgaagatttaaaacgagacctagaagctttagaaaaggaacatcctgaaggtatttatctttctggtgcactattaatgtttgctggctcaaaatcatattacttatatggtgcgtcttctaatgaatttagagattttttaccaaatcaccatatgcagtatacgatgatgaagtatgcacgtgaacatggtgcaacaacttacgatttcggtggtacagataatgatccagataaagactctgaacattatggcttatgggcatttaaaaaagtgtggggaacatacttaagtgaaaagattggtgaatttgattatatattgaatcagccattgtaccaattaattgagcaagttaaaccgcgtttaacaaaagctaaaattaaaatatctcgtaaattaaaacgaaaatag

SEQ ID NO: 162 - DNA, 5134 bp, Staphylococcus aureus
ttttatggagagtttgatcctggctcaggatgaacgctggcggcgtgcctaatacatgcaagtcgagcgaacggacgagaagcttgcttctctgatgttagcggcggacgggtgagtaacacgtggataacctacctataagactgggataacttcgggaaaccggagctaataccggataatattttgaaccgcatggttcaaaagtaaaagacggtcttgctgtcacttatagatggatccgcgctgcattagctagttggtaaggtaacggcttaccaaggcaacgatgcatagccgacctgagagggtgatcggccacactggaactgagacacggtccagactcctacgggaggcagcagtagggaatcttccgcaatgggcgaaagcctgacggagcaacgccgcgtgagtgatgaaggtcttcggatcgtaaaactctgttattagggaagaacatatgtgtaagtaactgtgcacatcttgacggtacctaatcagaaagccacggctaactacgtgccagcagccgcggtaatacgtaggtggcaagcgttatccggaattattgggcgtaaagcgcgcgtaggcggttttttaagtctgatgtgaaagcccacggctcaaccgtggagggtcattggaaactggaaaacttgagtgcagaagaggaaagtggaattccatgtgtagcggtgaaatgcgcagagatatggaggaacaccagtggcgaaggcgactttctggtctgtaactgacgctgatgtgcgaaagcgtggggatcaaacaggattagataccctggtagtccacgccgtaaacgatgagtgctaagtgttagggggtttccgccccttagtgctgcagctaacgcattaagcactccgcctggggagtacgaccgcaaggttgaaactcaaaggaattgacggggacccgcacaagcggtggagcatgtggtttaattcgaagcaacgcgaagaaccttaccaaatcttgacatcctttgacaactctagagatagagccttccccttcgggggacaaagtgacaggtggtgcatggttgtcgtcagctcgtgtcgtgagatgttgggttaagtcccgcaacgagcgcaacccttaagcttagttgccatcattaagttgggcactctaagttgactgccggtgacaaaccggaggaaggtggggatgacgtcaaatcatcatgccccttatgatttgggctacacacgtgctacaatggacaatacaaagggcagcgaaaccgcgaggtcaagcaaatcccataaagttgttctcagttcggattgtagtctgcaactcgactacatgaagctggaatcgctagtaatcgtagatcagcatgctacggtgaatacgttcccgggtcttgtacacaccgcccgtcacaccacgagagtttgtaacacccgaagccggtggagtaaccttttaggagctagccgtcgaaggtgggacaaatgattggggtgaagtcgtaacaaggtagccgtatcggaaggtgcggctggatcacctcctttctaaggatatattcggaacatcttcttcagaagatgcggaataacgtgacatattgtattcagttttgaatgtttatttaacattcaaatattttttggttaaagtgatattgcttatgcgagcgcttgacaatctattctttttaaagaaagcgattgtcagacaatgcattaagaaaaattaaagcggagtttacttttgtaaatgagcatttgattttttgaaaataaagcagtatgcgagcgcttgactaaaaagaaattgtacattgaaaactagataagtaagtaaaatatagattttaccaagcaaaaccgagtgaataaagagttttaaataagcttgaattcataagaaataatcgctagtgttcgaaagaacactcacaagattaataacgcgtttaaatctttttataaaagaacgtaacttcatgttaacgtttgacttataaaaatggtggaaacatagattaagttattaagggcgcacggtggatgccttggcactagaagccgatgaaggacgttactaacgacgatatgctttggggagctgtaagtaagctttgatccagagatttccgaatggggaaacccagcatgagttatgtcatgttatcgatatgtgaatacatagcatatcagaaggcacacccggagaactgaaacatcttagtacccggaggaagagaaagaaaattcgattcccttagtagcggcgagcgaaacgggaagagcccaaaccaacaagcttgcttgttggggttgtaggacactctatacggagttacaaaggacgacattagacgaatcatctggaaagatgaatcaaagaaggtaataatcctgtagtcgaaaatgttgtctctcttgagtggatcctgagtacgacggagcacgtgaaattccgtcggaatctgggaggaccatctcctaaggctaaatactctctagtgaccgatagtgaaccagtaccgtgagggaaaggtgaaaagcaccccggaaggggagtgaaatagaacctgaaaccgtgtgcttacaagtagtcagagcccgttaatgggtgatggcgtgccttttgtagaatgaaccggcgagttacgatttgatgcaaggttaagcagtaaatgtggagccgtagcgaaagcgagtctgaatagggcgtttagtatttggtcgtagacccgaaaccaggtgatctacccttggtcaggttgaagttcaggtaacactgaatggaggaccgaaccgacttacgttgaaaagtgagcggatgaactgagggtagcggagaaattccaatcgaacctggagatagctggttctctccgaaatagctttagggctagcctcaagtgatgattattggaggtagagcactgtttggacgaggggcccctctcgggttaccgaattcagacaaactccgaatgccaattaatttaacttgggagtcagaacatgggtgataaggtccgtgttcgaaagggaaacagcccagaccaccagctaaggtcccaaaatatatgttaagtggaaaaggatgtggcgttgcccagacaactaggatgttggcttagaagcagccatcatttaaagagtgcgtaatagctcactagtcgagtgacactgcgccgaaaatgtaccggggctaaacatattaccgaagctgtggattgtcctttggacaatggtaggagagcgttctaagggcgttgaagcatgatcgtaaggacatgtggagcgcttagaagtgagaatgccggtgtgagtagcgaaagacgggtgagaatcccgtccaccgattgactaaggtttccagaggaaggctcgtccgctctgggttagtcgggtcctaagctgaggccgacaggcgtaggcgatggataacaggttgatattcctgtaccacctataatcgttttaatcgatggggggacgcagtaggataggcgaagcgtgcgattggattgcacgtctaagcagtaaggctgagtattaggcaaatccggtactcgttaaggctgagctgtgatggggagaagacattgtgtcttcgagtcgttgatttcacactgccgagaaaagcctctagatagaaaataggtgcccgtaccgcaaaccgacacaggtagtcaagatgagaattctaaggtgagcgagcgaactctcgttaaggaactcggcaaaatgaccccgtaacttcgggagaaggggtgctctttagggttaacgcccagaagagccgcagtgaataggcccaagcgactgtttatcaaaaacacaggtctctgctaaaccgtaaggtgatgtataggggctgacgcctgcccggtgctggaaggttaagaggagtggttagcttctgcgaagctacgaatcgaagccccagtaaacggcggccgtaactataacggtcctaaggtagcgaaattccttgtcgggtaagttccgacccgcacgaaaggcgtaacgatttgggcactgtctcaacgagagactcggtgaaatcatagtacctgtgaagatgcaggttacccgcgacaggacggaaagaccccgtggagctttactgtagcctgatattgaaattcggcacagcttgtacaggataggtaggagcctttgaaacgtgagcgctagcttacgtggaggcgctggtgggatactaccctagctgtgttggctttctaacccgcaccacttatcgtggtgggagacagtgtcaggcgggcagtttgactggggcggtcgcctcctaaaaggtaacggaggcgctcaaaggttccctcagaatggttggaaatcattcatagagtgtaaaggcataagggagcttgactgcgagacctacaagtcgagcagggtcgaaagacggacttagtgatccggtggttccgcatggaagggccatcgctcaacggataaaagctaccccggggataacaggcttatctcccccaagagttcacatcgacggggaggtttggcacctcgatgtcggctcatcgcatcctggggctgtagtcggtcccaagggttgggctgttcgcccattaaagcggtacgcgagctgggttcagaacgtcgtgagacagttcggtccctatccgtcgtgggcgtaggaaatttgagaggagctgtccttagtacgagaggaccgggatggacatacctctggtgtaccagttgtcgtgccaacggcatagctgggtagctatgtgtggacgggataagtgctgaaagcatctaagcatgaagcccccctcaagatgagatttcccaacttcggttataagatccctcaaagatgatgaggttaataggttcgaggtggaagcatggtgacatgtggagctgacgaatactaatcgatcgaagacttaatcaaaataaatgttttgcgaagcaaaatcacttttacttactatctagttttgaatgtataatttacattcatatgtctggtgactatagcaaggaggtcacacctgttcccatgccgaacacagaagttaagctccttagcgtcgatggtagtcgaacttacgttccgctagagtagaacgttgccaggc

SEQ ID NO: 163 - DNA, 759 bp, Staphylococcus aureus
atgattgtaaaaacagaagaagaattacaagcgttaaaagaaattggatacatatgcgctaaagtgcgcaatacaatgcaagctgcaaccaaaccaggtatcactacgaaagagcttgataatattgcgaaagagttatttgaagaatacggtgctatttctgcgccaattcatgatgaaaattttcctggtcaaacgtgtattagtgtcaatgaagaggtggcacatgggattccaagtaagcgtgtcattcgtgaaggagatttagtaaatattgatgtatcggctttgaagaatggctattatgcagatacaggcatttcatttgtcgttggagaatcagatgatccaatgaaacaaaaagtatgtgacgtagcaacgatggcatttgagaatgcaattgcaaaagtaaaaccgggtactaagttaagtaacattggtaaagcggtgcataatacagctagacaaaatgatttgaaagtcattaaaaacttaacaggtcatggtgttggtttatcattacatgaagcaccagcacatgtacttaattactttgatccaaaagacaaaacattattaactgaaggtatggtattagctattgaaccgtttatctcatcaaatgcatcatttgttacagaaggtaaaaatgaatgggcttttgaaacgagcgataaaagttttgttgctcaaattgagcatacggttatcgtgactaaggatggtccgattttaacgacaaaaattgaagaagaatag

SEQ ID NO: 164 - DNA, 1263 bp, Staphylococcus aureus
atgacgaatgtattaattgaagatttaaaatggagaggtcttatttatcaacaaactgatgaacaaggtattgaagatttattaaataaagaacaagtgacgttatactgcggtgccgatccaacggcagatagtttacatattggtcacttactaccattcttaacattaagacgttttcaagaacatggacatcgtcctatcgttttaattggcggtggtacaggtatgattggtgatccatcaggtaaatcagaagaacgtgtgctacaaacagaagaacaagtagataaaaatatcgaaggtattagtaagcaaatgcacaatatttttgaatttggaacagaccatggtgcagtgcttgttaataatagagactggttaggacaaatctcattaattagctttttacgtgactatggtaaacacgtcggcgttaattacatgttaggtaaagattcaatccaaagtcgtttagaacatggtatttcatatacagaattcacatacacgattttacaagctattgatttcggtcatttgaatagagaattgaattgtaagattcaagtaggtggatcagatcaatggggtaatatcacaagtggtattgaattaatgcgtcgtatgtatggtcaaacagacgcatacggtttaactattccgcttgtaactaaatcagatggtaagaaatttggtaagtctgagtcaggtgctgtttggttagatgctgaaaaaacaagtccttatgaattttatcaattctggattaatcaatcagacgaagatgtaattaaattcttaaaatactttactttcttaggaaaagaagaaattgatcgcttagaacaatctaaaaatgaagcaccgcatttacgtgaagctcaaaaaacattagctgaagaagtaactaaatttattcatggtgaagatgcattaaatgatgcaatccgtatttcacaagcattatttagtggtgatttaaaatcattatcagcgaaagaattaaaagatggatttaaagatgtgcctcaagtgacattatcaaatgacacaacaaatatcgttgaagtccttattgaaacaggcatttctccttctaaacgacaagcacgtgaagatgttaacaatggtgcgatttatattaatggtgagagacaacaagatgttaattatgctttagcaccagaagataaaattgatggcgaatttacgattattcgtcgcggtaagaaaaaatacttcatggttaactatcaataa

SEQ ID NO: 165 - DNA, 1197 bp, Staphylococcus aureus
atgttaaataacaaacgattatttacttcagagtctgttacagaaggacacccagataaaatcgctgaccaagtgtcagatgcaatattagatgctattttaaaagacgacccaaatgcacgtgtagcttgtgaaacaactgttacaacaggtatggcattgatcgccggcgaaatttctacaacaacatatgttgatattccgaaagttgttagagaaacaattaaagaaattggatacacaagagcaaaatatggttatgattatgaaacaatggcaattttaactgcgattgatgaacaatcacctgacattgcacaaggcgtggataaagcattagagtatcgtgataaagatagcgaagaagaaattgaagcaacaggtgcaggtgaccaaggtttaatgtttggttacgcaacgaatgaaacagaaacgtacatgcctctagcaatttatttatcacatcaattggcaaaacgtttatctgatgtgcgtaaagatggtacgttaaattatttacgaccagacggtaaagttcaggtcactgttgaatatgatgaaaatgataacccagtacgtattgatacgattgtcgtatcaacacaacatgctgatgatgtgacacttgaacaaattcaagaagacatcaaagcgcatgtcatttatccaactgttccagaaaacttgattaatgaacaaactaaattctacatcaatcctacaggacgctttgtaatcggtggacctcaaggtgatgcaggattaacaggacgtaaaatcattgttgatacgtatggtggctatgcacgtcatggtggcggatgcttcagtggtaaggatcctacaaaagtagaccgctcagctgcatatgctgcacgttatgtggctaaaaatattgttgcagcaggtttagcagatcaatgtgaagtacaattggcatatgcgattggtgttgcagaaccagtgtcaattgcaattgatacatttggaacaggtaaagtttctgaaggacaacttgtcgaagcagttagaaaacactttgacctaagacctgcaggcattattaaaatgcttgatttgaaacaaccgatttacaaacaaactgctgcttatggtcattttggacgtacagatgtattattcccatgggaaaaattagacaaagtggaagaattaaaagacgcagtaaaatattaa

SEQ ID NO: 166 - DNA, 1695 bp, Staphylococcus aureus
atggtgttatatatcattttggcaataattgtgattatattgattgctgtaggtgtattattctatttacgttcaaataaacgacaaattattgaaaaagcaatcgaacgtaaaaatgaaattgagacgttaccttttgatcaaaaccttgcacaattatctaagttgaatttaaaaggtgaaacaaaaacgaaatacgatgcaatgaaaaaggacaacgtagaaagtacaaataagtatctagctcctgtggaagaaaaaatccataatgctgaggctttattagataaatttagtttcaacgcatctcaaagtgaaattgatgatgcaaatgagttgatggatagttacgaacaaagctatcagcaacaattagaagatgtaaatgaaattattgcgttatacaaagataatgatgaattatatgacaaatgtaaggttgattatcgtgaaatgaaacgtgatgttttagcaaatcgtcatcaatttggtgaggcagcaagtctacttgaaactgaaattgaaaagtttgagccaaggttagagcaatatgaagtactaaaagctgatggtaattatgtacaagcgcacaaccatatagctgccttgaatgaacaaatgaaacagctaagatcttatatggaagaaataccagaattaattagagaaactcaaaaagaattacctggtcaattccaagatttaaaatatggttgccgtgatcttaaagttgaagggtatgatctggatcacgtaaaagtagacagtacattacaaagcttaaaaacagagcttagtttcgttgaaccattaattagccgcttagaattagaagaagctaatgataaactagctaatatcaatgataagttagatgacatgtatgatttaattgaacatgaagttaaagctaaaaatgatgtcgaagaaacaaaagatatcattacggataacttattcaaagctaaagacatgaattatacattgcaaacagaaattgaatatgtacgtgaaaactactatataaatgaatctgatgctcaaagtgttcgtcaatttgaaaatgaaattcaaagtttaatttctgtatatgatgatattttaaaagaaatgtctaaatctgctgtacgatatagcgaggttcaggataatttacaatatttagaagatcatgtcacagttattaatgacaaacaagaaaagctacaaaatcatctgattcaattgcgtgaagatgaagcagaagcagaagacaatctgctacgagtacaatcgaagaaagaagaagtgtatcgtcgattacttgcttctaacttaacaagcgttcctgaaaggtttatcatcatgaaaaatgaaattgatcatgaagttcgtgatgttaacgaacaatttagtgaacgtccaatacacgttaaacagttaaaagataaagtgtctaaaattgtgattcaaatgaatacatttgaagatgaagcaaatgatgttcttgttaatgctgtttatgcagagaaattaattcaatatggaaatagatatcgtaaggactatagcaatgttgataagagcttaaatgaagctgaacgattatttaaaaataatcgctataagcgtgcgattgaaattgcagagcaagttcttgaaagtgttgagccaggtgtcactaaacatattgaagaagaagttattaagcaatag

SEQ ID NO: 167 - DNA, 618 bp, Staphylococcus aureus
atgtattcagtgattagtaagattttgaatttcattttagttaaaatgtcaaaatcattatacgtaatcggtaaagataatattcctaaggatagtaaatatgtcgtaacttgtacgcatgaaagttataacgaagttattatgctaggtatggcattatatcctaatcaaattcattatatggctaaaaaagaattattcaaaaataaatggattggtaaatttttaacgtctttaaatgcatttcctgtagatcgtgaaaatccaggacctagtactttaaaacgcccaatcaatttgttgaaagataataagacagttggtatcttcccaacaggttctcgcacatcgcaagaaggtgcaccattgaaacgtggtgcttcaacaattgcaatgttaagtaagtcaccaatattacctgttgcttatgttggtcctactaagattcatggtcttttaacaggacaagcatacataaatattggtaaaccaatcgatattaacgatttacctaaagatttaaaacgaaacgagcgtatcgattacattacaaaagagattgaaacacgaacagcaaagttacaacaagaattgcatgaaattgtaaaaagtttataa

SEQ ID NO: 168 - DNA, 921 bp, Staphylococcus aureus
atggaagttacattttttggaacgagtgcaggtttgcctacaaaagagagaaatacacaagcaatcgccttaaatttagaaccatattccaattccatatggcttttcgacgttggtgaaggtacacagcaccaaattttacatcatgcaatcaaattaggaaaagtgacacatatatttattactcatatgcatggcgatcatatttttggtttgccaggattactttctagtcgttcttttcagggcggtgaacagaagccgcttacattggttggaccaaaaggaattaaagcatatgtggaaatgtctatgaatttatcagagtcacatttaaactatccaattacatatattgaaatcgatgatcatctgacatatcatcatgatggttttactgtagaggcgcatttacttaatcatggtattccatcatatggatatagagtaatggcacctgaaactacaggtacaatcaatgttgaagcgttaaaaaacattggtcttgaaccaggtcctaaatatcaagaagtaaaatctcatgatacatttgaacataatggtcaagtttatcaatcaaaagattttagaggtgagtccaaacagggtccagttgtagcaatttttggtgatacaaaaccatgttctaatgaacgtgtgatttctagagatgctgatgtgatggtacatgaagcgacctatatagatggtgaaaagcatttagccaacaattatcatcatagccatattgaagacgtatttgcattgataaaagaagccaatgttaaacgtacgttgattacacatttgagcaatcgctataatacagaagatataaatgaaatttatcaaatattgatacaaaatgaagatacacctaattttaattttgtaaaagattttgatagttttaaagtctaa

SEQ ID NO: 169 - DNA, 1485 bp, Staphylococcus aureus
ttgagtactaaaaacaaacacatcccttgtttaatcacaatctttggtgcaactggtgacttaagccatcgtaagttgtttccatcaatattccatctctaccaacaagacaatttagatgaacatattgccatcatcggtattggacgtcgtgacattactaatgatgatttccgtaatcaagtaaaatcatcaattcaaaagcacgtaaaagatacaaacaaaattgacgcgtttatggaacatgtcttctatcatagacatgatgttagtaatgaagaaagctatcaagaattactagattttagtaatgaattagatagccaatttgaattaaaaggtaatcgactattctatttagcaatggcaccacaattctttggcgttatttctgattatctaaaatcttctggtcttactgatacaaaaggatttaaacgccttgttatcgaaaaaccattcggtagtgatttaaaatcagccgaagcattaaacaatcaaattcgtaaatcatttaaagaagaagaaatttatcgtattgaccactatttaggaaaagacatggttcaaaatatcgaggtattacgttttgcgaatgcgatgtttgaaccattatggaataacaaatatatttcaaacatccaagttacatcttctgaaatactaggtgttgaagatcgtggtggttattatgaatcaagtggcgcgctaaaagatatggtgcaaaaccacatgttacaaatggttgcattattagctatggaagcacctattagtttaaacagtgaagatatccgtgctgagaaagtaaaagtacttaaatcactgcgtcatttccaatctgaagatgttaaaaagaactttgttcgtggtcaatatggcgaaggctatatcgatggtaaacaagttaaagcataccgtgatgaagatcgcgttgcagatgactctaacacacctacctttgtttcaggtaaattaacaattgataactttagatgggctggtgtaccattctatattcgtactggtaaacgtatgaaatctaaaacaattcaagttgtcgttgaatttaaagaagtaccaatgaacttatactatgaaactgataaactattagattcaaacctattagtaatcaatatccaacctaatgaaggtgtatctttacatctaaatgctaagaaaaatacacaaggtatcgaaactgaacctgttcaattgtcttattcaatgagcgctcaagataaaatgaatactgtagatgcatatgaaaatctattattcgattgtcttaaaggtgatgccactaacttcacgcactgggaagaattaaaatcaacatggaaatttgttgatgcaattcaagatgaatggaatatggttgatccagaattccctaactatgaatcaggtactaatggtccattagaaagtgatttactacttgctcgtgatggtaaccattggtgggacgatattcaataa

SEQ ID NO: 170 - DNA, 1392 bp, Staphylococcus aureus
atggcaaaagatatggatacaattgtttcattagcaaaacacagaggttttgtgttccctggtagtgatatttacggtggtttatcaaacacatgggattatggtcctttaggtgttgaattaaagaataatgttaaaaaagcttggtggcaaaaattcattacacaatcaccgtttaacgttggtatcgacgctgcaatcttaatgaatccaaaagtatgggaagcttcaggacacttaaacaacttcaacgacccaatgattgataataaagatagtaaaattcgatatcgcgctgataaattaattgaagattatatgcaagatgttaaaggtgatgaaaacttcattgccgatggtttaagttttgaacaaatgaaaaaaattattgacgatgaaggtattgtttgtcctgtaagtaaaactgctaactggactgaaattcgccaattcaatttaatgtttaaaacattccaaggtgtaactgaagattctacaaatgaaattttcttacgtcctgaaacagcacaaggtatttttgtaaactataaaaacgtgcaacgttcaatgcgtaaaaaattaccatttggtatcggtcaaattggtaaatcattccgtaatgaaatcactccaggtaacttcattttcagaacaagagaatttgaacaaatggaacttgaattcttctgtaaacctggagaagaaatcgaatggcaaaattattggaaaacttttgcaagtgactggttaacaagcttaaatatgagcagtgaaaatatgcgtttacgtgatcatgatgaagatgaattatctcattactcaaatgcaacaactgatattgaatataaattcccatttggttggggtgagttatggggtatcgcaagtcgtacagacttcgacttacgtaaacatgctgaacactctggtgaagatttcagataccatgatccagaaacgaacgaaaaatatattccatattgtatcgagccatcacttggtgcagatcgtgtaacattagctttcttatgtgatgcatatgatgaagaaggcgttgaaggtagtaaagatgcacgtacagttttacacttccatcctgcattagcaccatataaagcagcgattttacctttaagtaagaaattatctggcgaagcgattaagatttttgagcaattaagttctaaattctcaatcgatttcgatgaatcacaatctatcggtaaaagataccgtcgtcaagatgaaatcggtacaccttattgtgtaacattcgactttgattcattagaagataatcaagttacagtacgtgacagagattcaatggaacaagttcgtatgccaatctcagagttagaagctttcttaactgaaaaaacaaaattctaa

SEQ ID NO: 171 - DNA, 177 bp, Staphylococcus aureus
atgtctaaaacagtagtacgtaaaaatgaatcacttgaagatgcgttacgtagatttaaacgttcagtttctaaaagtggaacaatccaagaagtacgtaaacgtgaattttacgaaaaaccaagcgtaaaacgtaaaaagaaatcagaagctgcacgtaaacgtaaattcaaataa

SEQ ID NO: 172 - DNA, 1938 bp, Staphylococcus aureus
atggaacaaattaatattcaatttccagatggtaataaaaaggcgtttgataaaggtactactactgaagatatagcacaatcaattagtcctggattacgtaaaaaagctgttgccggcaaatttaacgggcaacttgtagatttaactaaaccgcttgaaactgatggatcaattggaattgtgacaccaggtagtgaagaagcgttagaggtattacgtcattctactgcacatttaatggcacacgcgattaaaaggttatatggtaatgttaaatttggtgtaggtcctgtaatagaaggtggattctactatgacttcgacattgaccaaaacatctcatctgatgactttgaacaaattgaaaaaacaatgaaacaaatcgttaacgaaaatatgaaaatcgaacgaaaagtggtttcacgagatgaagcgaaagagttattcagcaatgatgaatacaaattagaattaatcgacgcgattcctgaagatgaaaatgtaacattatatagtcaaggtgattttactgatttatgtcgtggagttcacgttccatcaacagctaaaattaaagagtttaaactattatctacagcaggtgcatactggcgtggagatagtaacaacaaaatgttacaacgtatatacggtactgctttctttgataaaaaagaattaaaagcacatttacaaatgttagaagagcgtaaagaacgtgatcatcgtaaaattggtaaagagttagaattattcacaaatagccaattagttggtgctggtttgccattatggttacctaacggtgcaacaattagacgtgaaattgaacgttacattgttgataaagaggtgagcatgggttatgaccacgtttatacaccagtacttgctaatgttgatttatacaaaacatctggtcactgggatcactatcaagaagatatgttcccaccaatgcagttagatgaaactgaatctatggtattacgtccaatgaactgtccacatcatatgatgatttatgcgaataaaccacattcatatcgtgaattacctatccgtatcgctgagctaggaacgatgcatagatatgaagcaagtggtgctgtatcaggattacaacgtgttcgtggtatgactttaaatgattcacatatctttgttcgacctgatcaaattaaagaagaattcaaacgcgttgtaaacatgattattgatgtgtataaagactttggtttcgaggattatagctttagattaagttatagagaccctgaagataaagaaaagtactttgatgatgatgacatgtggaataaagctgaaaatatgcttaaagaggcagcggatgagcttggcttatcgtacgaagaagcgattggtgaagcggcattctatggtccgaaactagatgttcaagttaaaacagcgatgggtaaagaagagacattatcaacagcacaacttgatttcttattaccagaacgttttgatttaacttatattggtcaagatggtgaacatcatcgtccagttgttattcatcgtggtgttgtatcaacaatggaacgatttgtagcatttttaactgaagaaactaaaggtgcattcccaacttggttagcgccaaaacaagttcaaatcattccagttaacgttgatttacattatgattatgcgcgccaattgcaagatgaattgaaatctcaaggtgttcgtgtaagtattgatgaccgtaatgaaaaaatgggttataaaatcagagaagctcaaatgcaaaaaataccttatcaaatcgtagttggggataaggaagttgaaaataatcaagtgaatgtgcgtcaatatggatcgcaagaccaagaaacagttgaaaaagatgaatttatctggaatctagttgatgaaattcgtttgaaaaaacatagatag

SEQ ID NO: 173 - DNA, 270 bp, Staphylococcus aureus
atggctaagaaatctaaaatagcaaaagagagaaaaagagaagagttagtaaataaatattacgaattacgtaaagagttaaaagcaaaaggtgattacgaagcgttaagaaaattaccaagagattcatcacctacacgtttaactagaagatgtaaagtaactggaagacctagaggtgtattacgtaaatttgaaatgtctcgtattgcgtttagagaacatgcgcacaaaggacaaattccaggtgttaaaaaatcaagttggtaa

SEQ ID NO: 174 - DNA, 1293 bp, Staphylococcus aureus
atgaaaacaacgattaaacaagcgaaagatcatttaaaccaagacgttacaattggtgcttggttaacaaataaacgttcaagtggtaaaatcgcctttttacaattacgtgatggaacaggctttatgcaaggcgtagtagttaaatcagaagttgatgaagaggtattcaaacttgcgaaagaaattgctcaagaatcatctctatacgttacaggcacaattacagaagataatcgttctgacttaggatacgaaatgcaagtgaaatcaattgaagttatttcagaagcgcatgactatccgattacacctaaaaatcatggtacagaattcttaatggatcaccgtcatttatggttacgttctaaaaaacaacatgctgtaatgaaaattagaaatgaagttattcgtgcaacgtatgaatttttcaacaaagatggatttacaaaggttgatccaccaattttgacagcaagtgcaccagaaggtacaagtgaattattccatactaaatactttgatcaagatgcgtttttatctcaaagtggtcagttatacttagaagctgcagcaatggcacacggaaaagtattttcatttggtccaactttcagagctgaaaaatcaaaaacacgtagacacttgatcgagttctggatgattgaaggggaaatggctttcacaaatcatgctgaaagtttagaaattcaagaacaatatgtaacacatgtagtaaaatcagttttagaaaattgtaaactagagttgaaaattttagagcgtgatacatcaaaacttgaaaaagttgcgacaccattccctagaatttcatatgatgatgcaattgaattcttaaaagcagaaggctttgatgatattgaatggggtgaagattttggtgcgccacatgaaactgccattgctaatcattatgatttaccggtgtttattactaattatccaactaaaattaagcctttctatatgcaaccaaatcctgagaatgaagaaactgtcttatgtgcagacttaattgcacctgaaggatacggtgaaattatcggtggatctgaacgtgtggatgacttagaattgttagaacaacgcgttaaagaacatggattagacgaagaagcatatagttactacttagacttacgtcgttatggtagtgtgccacactgtggatttggtttaggtttagagcgcacagtagcatggatttctggtgttgaacacgttcgtgaaactgcgccattcccaagattattaaaccgtttatatccataa

SEQ ID NO: 175 - DNA, 273 bp, Staphylococcus aureus
atgaacaaaacagatttaatcaatgcagttgcagagcaagctgatttaactaaaaaagaagctggttcagcagtagatgctgtattcgaatcaatccaaaactcacttgctaaaggtgaaaaagtacaattaattggtttcggtaactttgaggtacgtgaacgtgctgcacgtaaaggtcgtaaccctcaaactggtaaagaaattgatatcccagcaagtaaagttccagcattcaaagctggtaaagcattaaaagatgctgtaaaataa

SEQ ID NO: 176 - DNA, 1674 bp, Staphylococcus aureus
ttgagtttaataaagaaaaagaataaagatattcgcattataccattaggcggtgttggcgaaattgctaaaaatatgtatatcgttgaagtagacgatgaaatgtttatgttagatgctggacttatgtttccagaagacgaaatgctaggtattgatattgttataccagacatttcatacgtacttgaaaataaagataaattgaagggtatattccttacacacggacatgagcacgcgattggtgcagtgagttatgttttagaacaattagatgcaccagtatatggatctaaattgacaatagcgttaattaaagaaaatatgaaagcccgtaatattgataaaaaagttcgctactacacagttaacaatgattcaattatgagattcaaaaacgtgaatattagtttctttaatacgacacacagtattcctgatagtttaggtgtttgtattcacacttcatatggtgccattgtgtatacaggtgaatttaagtttgaccaaagtttacatggacattatgcaccagatattaaacgtatggcagagattggtgaagaaggcgtatttgtcttaatcagtgattctactgaggcagagaaacctggatataatactccggaaaatgtaattgaacatcatatgtatgatgcttttgcaaaagtgcgaggtcgcttgattgtttcatgttatgcttcgaactttatacgtattcagcaagttttaaatattgctagcaagctaaatcgtaaagtgtcatttttaggaagatcacttgaaagttcatttaatattgctcgtaaaatggggtatttcgacattcctaaagatttgctaattcctataacagaagttgataattatcctaaaaatgaagtgataattatagctactggtatgcaaggagaacctgtagaagccttaagtcaaatggcgcaacataagcataaaattatgaatatcgaagaaggcgattctgtatttttagcaattacggcttctgctaatatggaagttatcattgcgaatacattaaatgagcttgtacgtgctggcgcacatattattccaaataacaagaagattcatgcttcaagtcatggttgcatggaagaattaaaaatgatgattaatattatgaaacctgaatactttattcctgtacaaggtgaatttaaaatgcagatagcacatgcgaagctagcagctgaagcaggtgttgcaccggaaaagattttccttgtggaaaaaggagatgtcattaattacaacggtaaagatatgatattaaatgaaaaggtaaattcgggaaatattttaatagatggtattggtattggggatgtaggaaatatcgtgttgagagaccgtcatcttttagcagaagatggtatctttattgctgtagtaacgttagatcctaaaaatagacgtatagctgcgggtcctgaaattcaatctcgtgggtttgtatatgtacgtgaaagtgaagacttattacgtgaagcagaagagaaagtacgtgaaatagtagaagctggtttacaagaaaaacgcatagaatggtctgaaattaagcaaaatatgcgtgatcaaattagtaaactattattcgaaagtacaaaacgtcgtcctatgattattccagtaatttctgaaatttaa

SEQ ID NO: 177 - DNA, 552 bp, Staphylococcus aureus
atgttaacaatgaaagacatcattagagatggtcatccaactttgcgtcaaaaagcagctgagttagaattaccattaactaaagaagaaaaagaaacattaatcgccatgagagagtttttagtaaatagtcaagatgaggaaatcgcgaaacgatatggtttacgttcaggcgttggtttggctgcacctcaaattaatatttctaaacgtatgattgctgttttaataccagatgatggcagtggcaaatcttatgactatatgcttgtgaacccaaaaattgtaagtcatagcgttcaagaagcttatttaccaactggtgaaggttgccttagtgtcgatgataatgttgctggtctagttcaccgtcataatagaattacaattaaagccaaagacatcgaaggtaatgatatacaattacgactaaaaggatatccagcaattgttttccaacatgaaattgaccatttaaatggtgtaatgttctatgatcacattgacaaaaatcacccattacaaccacatacagatgctgtagaagtttaa

SEQ ID NO: 178 - DNA, 1122 bp, Staphylococcus aureus
atggtatatagtgcaagtatggttccagcaactaaaggcacattgactggtggtatcgatgttccaggaacgtatttttacaaccgacaattagcatatgtcataatgagttttataattgtattttttattgcatttttaatgaatgttaaattactgagtaatattaaagtgcaaaaaggtatgattataactatcgtctcactattattactgacgttagtaataggtaaagatattaatggttctaaaagttggataaacttaggatttatgaatttacaggcatctgagttattaaaaattgcaatcatattatatatcccatttatgatcagtaaaaaaatgcctagagtattaagtaaaccaaaattaattttaagtcctattgtattagcattaggttgtacgtttttagttttcttacaaaaagacgtagggcaaacattactaatattaattattttagttgcgattattttttattcaggaattggggtaaacaaagtcctaagatttggtataccagcagtgctaggattcttagtagtatttgtcattgcattaatggctggttggttaccaagctatttaactgccagatttagtacgctaacagatccattccaattcgaatcaggaactggataccatatttccaattcattgcttgcgataggtaacggtggcgtatttggaaaaggattaggaaatagtgcaatgaaattgggctatttaccagaaccacatacagattttatttttgcaattatttgcgaagaattaggtttaatcggaggattgctagttattactttagagttctttattgtatatcgtgccttccagtttgcaaataaaacatcatcatatttttataaacttgtgtgtgttgggattgccacatactttggaagtcaaacgtttgtaaacattggcggtatttcggcaacaattccattaactggtgtgccattgccatttatcagctttggtggatcatcaatgattagtttaagtattgctatgggattacttctgattgtaggtaaacaaatcaaagtagaccagcaacgaaagaaacaacaacaaaaagttgatataagaagacaatttaattaa

SEQ ID NO: 179 - DNA, 74 bp, Staphylococcus aureus
gtcctggtagctcagctggatagagcaatggccttctaagccatcggtcgggggttcgaatccctcccaggacg

SEQ ID NO: 180 - DNA, 1332 bp, Staphylococcus aureus
atgactcatattcaattagattttagtaaaacgttagaatttttcggtgaacacgaattaaaacaacaacaagaaattgttaaatcaattcacaaaacaattcatgaaggtactggtgcaggtagtgacttcttaggctgggttgatttaccagttgattacgacaaagaagaattttcaagaattgttgaagcatcaaaacgcattaaagaaaattctgatgttttagtagtcatcggtattggtggttcttacttaggtgcacgtgcagcaatcgaaatgttaacgtcatcatttagaaacagcaatgaataccctgaaattgtatttgttggtaatcacttatcatcaacatatacgaaagagttagttgattatttagcagacaaagatttctctgtaaacgttatttctaaatctggtacaactacagaaccagcagttgcatttagattgttcaaacaattagttgaagaaagatacggtaaagaagaagcacaaaaacgtatatttgcaacaacggataaagaaaaaggtgctttaaaacagttggctacaaacgaaggttatgaaacgtttatcgtacctgatgatgtaggtggaagatattctgttttaacagcagtaggattattaccaattgcaacagctggaattaacatcgaagctatgatgattggtgctgcaaaagcacgtgaagaattatcttcagataaattagaagacaacattgcataccaatatgcgacaattcgaaacattttatatgcaaaaggttatacaacagaaatgttgattaactatgaaccatctatgcaatactttaatgaatggtggaaacaattatttggtgaatcagaaggtaaagacttcaaaggtatctatccttcaagtgccaactacacaactgatttacattctttaggtcaatatgtacaagaaggccgtcgtttcttattcgaaacagtggtaaaagtaaatcatcctaaatatgatattactattgaaaaagatagtgatgatctagacggattaaattatttggctggtaaaacaatcgacgaagttaacacaaaagcattcgaaggtacattattagcgcatactgatggtggtgttcctaacatggtagtgaacattccacaattagatgaagaaactttcggttatgtcgtatacttcttcgaacttgcttgtgcaatgagtggataccaattaggtgtaaatccatttaaccaacctggtgtagaagcatataaacaaaacatgttcgcattattaggtaaacctggttttgaagacttgaaaaaagaattagaagagcgtttataa

SEQ ID NO: 181 - DNA, 990 bp, Staphylococcus aureus
atggagacattattttcaggcatccaacctagtggaattcctactattggaaattatattggcgcactaaaacaatttgttgatgtgcaaaatgactatgattgttatttctgtatcgtagatcaacatgcaattacaatgccacaagatcgtttaaaattacgtaaacagaccagacaattagcagcgatttatttagcttctggtatagatccagacaaagcaacattgttcatacaatctgaagtccctgcacacgtacaagcaggatggatgttaactacgattgcttctgttggagaattagagcgtatgacgcaatacaaagataaagctcagaaagcagttgaaggtataccagctggtctattaacatatccacctttaatggcagctgatattgttctttacaatactaatatcgttccagttggagatgaccaaaagcagcatatcgaattgactcgtaaccttgtagatagatttaatagtcgctataatgatgtgcttgtgaaacctgaaattcgtatgcctaaagttggtggacgtgtcatgagtttacaagacccaacaagaaaaatgagtaagagtgatgataatgctaaaaacttcatttcattattggacgagccgaatgttgcagctaaaaaaattaaaagcgcagtaactgattcagatggtattattaaatttgatcgtgacaacaagccaggtataacaaatttaatttcaatatacgctggattaaccgacatgccaattaaagatattgaggcaaaatatgaaggggaaggttatggtaaatttaaaggtgaccttgctgaaatagttaaagcatttttagtagaattccaagaaaaatacgaaagtttctataactcagataaacttgatgatattttagatcaaggtagagataaagcacacaaagtttcatttaaaactgtcaaaaaaatggaaaaagcgatgggattaggacgtaagagataa

SEQ ID NO: 182 - DNA, 876 bp, Staphylococcus aureus
atgtttatcattgaattaataaaaggtattatcttaggggtcgtcgaaggattaacagaatttgcacctgtttcctctactggacatatgattctagttgatgatatgtggttaaaatcatctgaatttttaggttctcaatcagcatttacatttaaaatcgtcatccaattaggatccgtctttgcagcagcatgggtattccgcgaacgcttcttagagattttacatattggtaaacacaaacatgttgaaggagaaaacgatcaacaaagacgttcaaagccaagacgtttaaatttattacatgtattagtgggtatggtgccagcaggtattttaggcttactatttgatgatttcatcgaagaacatttatttagtgtgccaactgttatgattggcttattcgtaggtgctatctatatgattattgctgataagtattcagttaaagttaaaaacccacaaacagtggatcaaatcaattatttccaagcgtttgtaattggtatctctcaagcagtagctatgtggcctggtttcagccgttcaggctcaacaatttcaactggggtattaatgaaattaaatcataaagcagcatcggacttcacatttattatggctgttccaattatgttagcagctagtggtttatctttattaaaacattatcaagatattcagattgctgatatacctttttatattttaggctttttagctgcatttactgttggactaattgcaatcaaaacattcttgcatctaattaacaaaatcaaactaattccatttgccatttacagaattgtattagtaatctttattgctatactttacttcggatttggcattggtaaaggtatttaa

SEQ ID NO: 183 - DNA, 984 bp, Staphylococcus aureus
atgaaaattagagtcgtcattccttgttttaatgaaggggaagtcattacacaaacacatcaacaattaactgaaatactttcacaagatagtagtgtgaaaggctatgattataatatgcttttcatagatgatggaagtacggataccactatagatgaaatgcaacatcttgccacaatagataggcatgtcagctttatttcttttagtagaaattttggaaaagaagcagctatgattgcaggttaccagcatagtactgaatttgatgcagtcatcatgatagattgtgatttgcaacatccacctgaatatattccgaaaatggttgaaggttttatggaaggctatgatcaagtgattgcaaagcgtgatagaagtggtgaaaattttagtcgcaaaacattaagccatttgtattataagttagttaattgctttgtagaagaagtacaatttgatgatggtgttggtgattttagacttttaagccaaagagctgttaaatccattgcatcacttgaagaatataatcgattttcaaaagggttatttgaatggataggctataatactaaagtgtttacgtatcaaaatgttgagagacaaaaaggggaatctaagtggtcctttaaaaagttatttaattatggtattgatggattgatttcctttaatagtaaacctttgagaatgatgatttatcttggcttgtttatcttttcaataagcgcgctatatattatctatttattcatcaatattatgatatctggtgttaatattccaggatatttttcaacgattgcagctattttattattaggcggcatacagttaatttcaattggtgttgtaggtgaatatattggcaggatatattatgaagttaaggcacgtcctaaatatattattcaagctacaaatctttcaagtattgaaaatgatgagaaggatacccataaagtttattctaaataa

SEQ ID NO: 184 - DNA, 1125 bp, Staphylococcus aureus
atgaaagtattagtagccatggatgagtttcatggaattatttcgagttatcaagctaatagatatgttgaagaggcagttgcaagccaaattgaaactgcagatgtagttcaagtaccattgtttaatggaagacatgaattattagattctgtatttttatggcaatctgggcaaaagtatcgtataccagtacatgatgcagatatgaatgaagttgaaggtgtttacggacaaactgatacagggatgaccgttatcgaggggaatttatttttaaaaggtaaaaaaccaattgttgaacgaacaagttatggtttaggagaaatgattaaacatgcattagataatgacgcaaaacatgttgtaatttcactaggtgggattgatagttttgatgctggtgcaggtatgttacaagcattaggtgctcaattctatgatgacgaagggcgtgtcgtagatatgagacaaggtgctggtgtaattaaatatattcgtcgtatggatatgtcgaacttacaccctaaaatggaaacagcaagaattcaagtaatgtcggatttttcaagtcgattatatggtaagcaaagtgaaatcatgcaaacttatgatgcgcatcagttgcatcataatcaagcagcagaaatcgataatttaatttggtattttagtgagttatttaaaagtgaattgaaaattgcaattggtccagttgaacgtggtggtgctggtggtggaattgcagcagtcttgaatggactgtatcaagctgaaatattaaccagtcatgcattagtagaccaactaacacatttagaaaatttagttgaacaagcggatttaattatttttggagaaggattaaatgaaaatgatcagttgctagaaacgacaacattgcgtattgcagaactttgtcataaacatcaaaaggttgccattgcaatttgtgcaactgctgaaaagtttgatttatttgaatcacaaggggttacagcaatgtttaatacatttatcgatatgccagaaacttatactgactttaaaatgggattacaaattaggcattatacggttcagtctttaaaactgttgaaaacacattttaatgttgaggtttag

SEQ ID NO: 185 - DNA, 2532 bp, Staphylococcus aureus
atgggatttttatcaaaaattcttgatggcaataataaagaaattaaacagttaggtaaacttgctgataaagtaatcgctttagaagaaaaaacggcaattttaactgatgaagaaattcgtaataaaacgaaacaattccaaacagaattagctgacattgataatgtcaaaaagcaaaatgattatttagataaaattttaccagaagcatatgcacttgttagagaaggctctaaacgtgtattcaatatgacaccatataaagttcaaattatgggtggtattgcaattcataaaggtgatatcgctgagatgagaacaggtgaaggtaaaacattaacagcgacaatgccaacatacttaaatgcattagctggtagaggtgttcacgttattacagtcaatgaatacttatcaagtgttcaaagtgaagaaatggctgagttatataacttcttaggtttgactgtcggattaaacttaaacagtaagacgacagaagaaaaacgtgaagcatacgcacaagacattacttacagtactaataatgagctaggttttgattacttacgagataacatggtgaattattctgaagatagagtaatgcgtccattacattttgcaatcattgatgaggttgactcaattttaatcgacgaggcacgtacgccattaattatttctggtgaagctgaaaagtcaacgtcactttatacacaagcaaatgtttttgcgaaaatgttaaaacaggacgaagattataaatacgatgaaaaaacgaaagccgtacatttaacagaacaaggtgcggataaagctgaacgtatgttcaaagttgaaaacttatatgatgtacaaaatgttgatgttattagtcatatcaacacagctttacgtgcgcacgttacattacaacgtgacgtagactatatggttgttgatggcgaagtactaattgtcgatcaatttacaggacgtacaatgccaggccgtcgtttctcagaaggtttacaccaagctattgaagcgaaggaaggcgttcaaattcaaaatgaatctaaaactatggcgtctattacattccaaaactatttcagaatgtacaataaacttgcgggtatgacaggtacagctaaaactgaagaagaagaatttagaaatatttataacatgacagtaactcaaattccgacaaataaacctgtgcaacgtaacgataagtctgatttaatttacattagccaaaaaggtaaatttgatgcagtagtagaagatgttgttgaaaaacacaaggcagggcaaccagtgctattaggtactgttgcagttgagacttctgaatatatttcaaatttacttaaaaaacgtggtatccgtcatgatgtgttaaatgcgaaaaatcatgaacgtgaagctgaaattgttgcaggcgctggacaaaaaggtgccgttactattgccactaacatggctggtcgtggtacagatatcaaattaggtgaaggcgtagaggaattaggcggtttagcagtaataggtacagaacgacatgaatctcgtcgtattgatgaccagttacgtggtcgttctggacgtcaaggtgataaaggggatagtcgcttctatttatcattacaagatgaattaatgattcgttttggttctgaacgtttacagaaaatgatgagccgactaggtttagatgactctacaccaattgaatcaaaaatggtatcaagagctgtagaatcagcacaaaaacgtgtagaaggtaataacttcgacgcgcgtaaacgtatcttagaatacgatgaagtattacgtaaacaacgtgaaattatctataacgaaagaaatagtattattgatgaagaagacagctctcaagttgtagatgcaatgctacgttcaacgttacaacgtagtatcaattactatattaatacagcagatgacgagcctgaatatcaaccattcatcgactacattaatgacattttcttacaagaaggtgacattacagaggatgatatcaaaggtaaagatgctgaagatattttcgaagtcgtttgggctaagattgaagcagcatatcaaagtcaaaaagatatcttagaagaacaaatgaatgagtttgagcgtatgattttacttcgttctattgatagccattggactgatcatatcgacacaatggatcaattacgtcaaggtattcacttacgttcttatgcacagcaaaatccattacgtgactatcaaaatgaaggtcatgaattatttgatatcatgatgcaaaatatcgaagaagatacttgtaaattcattttaaaatctgtagtacaagttgaagataatattgaacgtgaaaaaacaacagagtttggtgaagcgaagcacgtttcagctgaagatggtaaagaaaaagtgaaaccgaaaccaatcgttaaaggcgatcaagttggtcgtaacgatgattgtccatgtggtagtggtaaaaaattcaaaaattgccatggaaaataa

SEQ ID NO: 186 - DNA, 993 bp, Staphylococcus aureus
atggcagaacctaatttttgggataaccaaacgaaagcgcaagatattatagataaaaataatgcgttaaaagcaatagttaatggttataaaacactacaagcagaagtagatgacatggatgctacttgggatttattacaagaagaatttgatgaagaaatgaaagaagacttagagcaagaggtcattaattttaaggctaaagtggatgaatacgaattgcaattattattagatgggcctcacgatgccaataacgcaattctagagttacatcctggtgcaggtggcacggagtctcaagattgggctaatatgctatttagaatgtatcaacgttattgtgagaagaaaggctttaaagttgaaactgttgattatctacctggggatgaagcggggattaaaagtgtaacattgctcatcaaagggcataatgcttatggttatttaaaagctgaaaaaggtgtacaccgactagtacgaatttctccatttgattcatcaggacgtcgtcatacatcatttgcatcatgcgacgttattccagattttaataatgatgaaatagagattgaaatcaatccggatgatattacagttgatacattcagagcttctggtgcaggtggtcagcatattaacaaaactgaatcggcaatacgaattacccaccacccctcaggtatagttgttaataaccaaaatgaacgttctcaaattaaaaaccgtgaagcagctatgaaaatgttaaagtctaaattatatcaattaaaattggaagagcaggcacgtgaaatggctgaaattcgtggcgaacaaaaagaaatcggctggggaagccaaattagatcatatgttttccatccatactcaatggtgaaagatcatcgtacgaacgaagaaacaggtaaggttgatgcagtgatggatggagacattggaccatttatcgaatcatatttaagacagacaatgtcgcacgattaa

SEQ ID NO: 187 - DNA, 72 bp, Staphylococcus aureus
ctccttgtggtgtaatggataacacgtaagattccggttcttaagataggggttcaattcccttcaaggagg

SEQ ID NO: 188 - DNA, 90 bp, Staphylococcus aureus
ggaggaatacccaagtccggctgaagggatcggtcttgaaaaccgacaggggcttaacggctcgcgggggttcgaatccctcttcctccg

SEQ ID NO: 189 - DNA, 5029 bp, Staphylococcus aureus
ttttatggagagtttgatcctggctcaggatgaacgctggcggcgtgcctaatacatgcaagtcgagcgaacggacgagaagcttgcttctctgatgttagcggcggacgggtgagtaacacgtggataacctacctataagactgggataacttcgggaaaccggagctaataccggataatattttgaaccgcatggttcaaaagtgaaagacggtcttgctgtcacttatagatggatccgcgctgcattagctagttggtaaggtaacggcttaccaaggcaacgatgcatagccgacctgagagggtgatcggccacactggaactgagacacggtccagactcctacgggaggcagcagtagggaatcttccgcaatgggcgaaagcctgacggagcaacgccgcgtgagtgatgaaggtcttcggatcgtaaaactctgttattagggaagaacatatgtgtaagtaactgtgcacatcttgacggtacctaatcagaaagccacggctaactacgtgccagcagccgcggtaatacgtaggtggcaagcgttatccggaattattgggcgtaaagcgcgcgtaggcggttttttaagtctgatgtgaaagcccacggctcaaccgtggagggtcattggaaactggaaaacttgagtgcagaagaggaaagtggaattccatgtgtagcggtgaaatgcgcagagatatggaggaacaccagtggcgaaggcgactttctggtctgtaactgacgctgatgtgcgaaagcgtggggatcaaacaggattagataccctggtagtccacgccgtaaacgatgagtgctaagtgttagggggtttccgccccttagtgctgcagctaacgcattaagcactccgcctggggagtacgaccgcaaggttgaaactcaaaggaattgacggggacccgcacaagcggtggagcatgtggtttaattcgaagcaacgcgaagaaccttaccaaatcttgacatcctttgacaactctagagatagagccttcctcttcgggggacaaagtgacaggtggtgcatggttgtcgtcagctcgtgtcgtgagatgttgggttaagtcccgcaacgagcgcaacccttaagcttagttgccatcattaagttgggcactctaagttgactgccggtgacaaaccggaggaaggtggggatgacgtcaaatcatcatgccccttatgatttgggctacacacgtgctacaatggacaatacaaagggcagcgaaaccgcgaggtcaagcaaatcccataaagttgttctcagttcggattgtagtctgcaactcgactacatgaagctggaatcgctagtaatcgtagatcagcatgctacggtgaatacgttcccgggtcttgtacacaccgcccgtcacaccacgagagtttgtaacacccgaagccggtggagtaaccttttaggagctagccgtcgaaggtgggacaaatgattggggtgaagtcgtaacaaggtagccgtatcggaaggtgcggctggatcacctcctttctaaggatatattcggaacatcttcttcagaagatgcggaataatgtgacatattgtattcagttttgaatgtttatttaacattcaaatattttttggttaaagtgatattgcttatgaaaataaagcagtatgcgagcgcttgactaaaaagaaattgtacattgaaaactagataagtaagtaaaatatagattttaccaagcaaaaccgagtgaataaagagttttaaataagcttgaattcataagaaataatcgctagtgttcgaaagaacactcacaagattaataacgcgtttaaatctttttataaaagaacgtaacttcatgttaacgtttgacttataaaaatggtggaaacatagattaagttattaagggcgcacggtggatgccttggcactagaagccgatgaaggacgttactaacgacgatatgctttggggagctgtaagtaagctttgatccagagatttccgaatggggaaacccagcatgagttatgtcatgttatcgatatgtgaatacatagcatatcagaaggcacacccggagaactgaaacatcttagtacccggaggaagagaaagaaaattcgattcccttagtagcggcgagcgaaacgggaagagcccaaaccaacaagcttgcttgttggggttgtaggacactctatacggagttacaaaggacgacattagacgaatcatctggaaagatgaatcaaagaaggtaataatcctgtagtcgaaaatgttgtctctcttgagtggatcctgagtacgacggagcacgtgaaattccgtcggaatctgggaggaccatctcctaaggctaaatactctctagtgaccgatagtgaaccagtaccgtgagggaaaggtgaaaagcaccccggaaggggagtgaaatagaacctgaaaccgtgtgcttacaagtagtcagagcccgttaatgggtgatggcgtgccttttgtagaatgaaccggcgagttacgatttgatgcaaggttaagcagtaaatgtggagccgtagcgaaagcgagtctgaatagggcgtttagtatttggtcgtagacccgaaaccaggtgatctacccttggtcaggttgaagttcaggtaacactgaatggaggaccgaaccgacttacgttgaaaagtgagcggatgaactgagggtagcggagaaattccaatcgaacctggagatagctggttctctccgaaatagctttagggctagcctcaagtgatgattattggaggtagagcactgtttggacgaggggcccctctcgggttaccgaattcagacaaactccgaatgccaattaatttaacttgggagtcagaacatgggtgataaggtccgtgttcgaaagggaaacagcccagaccaccagctaaggtcccaaaatatatgttaagtggaaaaggatgtggcgttgcccagacaactaggatgttggcttagaagcagccatcatttaaagagtgcgtaatagctcactagtcgagtgacactgcgccgaaaatgtaccggggctaaacatattaccgaagctgtggattgtcctttggacaatggtaggagagcgttctaagggcgttgaagcatgatcgtaaggacatgtggagcgcttagaagtgagaatgccggtgtgagtagcgaaagacgggtgagaatcccgtccaccgattgactaaggtttccagaggaaggctcgtccgctctgggttagtcgggtcctaagctgaggccgacaggcgtaggcgatggataacaggttgatattcctgtaccacctataatcgttttaatcgatggggggacgcagtaggataggcgaagcgtgcgattggattgcacgtctaagcagtaaggctgagtattaggcaaatccggtactcgttaaggctgagctgtgatggggagaagacattgagtcttcgagtcgttgatttcacactgccgagaaaagcctctagatagaaaataggtgcccgtaccgcaaaccgacacaggtagtcaagatgagaattctaaggtgagcgagcgaactctcgttaaggaactcggcaaaatgaccccgtaacttcgggagaaggggtgctctttagggttaacgcccagaagagccgcagtgaataggcccaagcgactgtttatcaaaaacacaggtctctgctaaaccgtaaggtgatgtataggggctgacgcctgcccggtgctggaaggttaagaggagtggttagcttctgcgaagctacgaatcgaagccccagtaaacggcggccgtaactataacggtcctaaggtagcgaaattccttgtcgggtaagttccgacccgcacgaaaggcgtaacgatttgggcactgtctcaacgagagactcggtgaaatcatagtacctgtgaagatgcaggttacccgcgacaggacggaaagaccccgtggagctttactgtagcctgatattgaaattcggcacagcttgtacaggataggtaggagcctttgaaacgtgagcgctagcttacgtggaggcgctggtgggatactaccctagctgtgttggctttctaacccgcaccacttatcgtggtgggagacagtgtcaagcgggcagtttgactggggcggtcgcctcctaaaaggtaacggaggcgctcaaaggttccctcagaatggttggaaatcattcatagagtgtaaaggcataagggagcttgactgcgagacctacaagtcgagcagggtcgaaagacggacttagtgatccggtggttccgcatggaagggccatcgctcaacggataaaagctaccccggggataacaggcttatctcccccaagagttcacatcgacggggaggtttggcacctcgatgtcggctcatcgcatcctggggctgtagtcggtcccaagggttgggctgttcgcccattaaagcggtacgcgagctgggttcagaacgtcgtgagacagttcggtccctatccgtcgtgggcgtaggaaatttgagaggagctgtccttagtacgagaggaccgggatggacatacctctggtgtaccagttgtcgtgccaacggcatagctgggtagctatgtgtggacgggataagtgctgaaagcatctaagcatgaagcccccctcaagatgagatttcccaacttcggttataagatccctcaaagatgatgaggttaataggttcgaggtggaagcatggtgacatgtggagctgacgaatactaatcgatcgaagacttaatcaaaataaatgttttgcgaagcaaaatcacttttacttactatctagttttgaatgtataatctacattcatatgtctggtgactatagcaaggaggtcacacctgttcccatgccgaacacagaagttaagctccttagcgtcgatggtagtcgaacttacgttccgctagagtagaacgttgccaggc

SEQ ID NO: 190 - DNA, 1455 bp, Staphylococcus aureus
atgagcgatcgtataagagtaagatatgcaccaagtccaactggttatcttcatattggtaatgcaagaacagcattattcaattacttgtatgctaaacattacaacggagattttgtgattcgaattgaagatactgataaaaaacgtaatttagaagatggagaaacatcacaatttgataatcttaaatggttaggattagattgggatgagtctgtagataaagacaatggctacggaccatatcgtcaatctgaacgtcaacatatctaccaaccattaatagatcagttactagcagaagataaagcatataaatgctatatgacagaagaagaattagaagctgaacgtgaagcgcaaatcgctcgtggtgaaatgcctcgctatggtggtcaacatgcgcatttgactgaagaacaacgtcaacaatttgaagcagaaggacgccaaccatcaattcgtttccgagtacctcaaaaccaaacgtattcatttgatgatatggtaaaaggaaatatttcatttgattcaaatggtattggtgactgggttatcgtaaaaaaagatggcattccaacgtacaattttgcagtagctatagatgatcattacatgcaaatttcagatgtaattcgtggtgatgatcatatttcaaacacgcctaaacaaattatgatttatgaagcatttggctgggagccacctcgttttggtcatatgtcattaattgttaatgaagaacgtaaaaagttaagtaaacgtgatgggcaaattttacaatttattgagcaatatcgtgacttaggttatttacctgaagcgttatttaattttattgcgttattaggttggtctcctgaaggtgaagaagaaatcttttctaaagaagaatttatcaaaatctttgatgaaaagcgtttgtcaaaatcaccagcatttttcgataagcaaaaattagcatgggttaataaccaatatatgaaacaaaaagatactgaaacagtattccaattagcattacctcatttaattaaagcaaatttgattcctgaggtgccgtcagaagaggatttatcttggggacgcaaattaattgcgctttatcaaaaagaaatgagttatgccggtgaaattgtacctttatcagaaatgttctttaaagaaatgccagctcttggtgaagaagaacaacaagtgattaatggagagcaagtaccagagttaatgacgcacttattcagtaaattagaagcacttgaaccatttgaagcggctgaaattaaaaagacaattaaagaagttcaaaaagaaacaggaataaaaggcaagcaattatttatgcctattcgtgttgctgtaacaggccaaatgcatggtcctgaattaccaaatacaattgaagtacttggtaaagaaaaagtgctaaaccgtttaaaacaatataagtaa

SEQ ID NO: 191 - DNA, 1287 bp, Staphylococcus aureus
atgttagacattagattattcagaaatgagcctgacacagttaagagcaaaattgaattacgtggagatgatccaaaagttgtagatgaaattttagaattggatgagcaacgacgtaaattaattagtgcaacagaagaaatgaaagcacgtcgtaataaagtaagcgaagaaatcgcattaaaaaaacgtaataaagaaaatgctgatgatgtgattgctgaaatgcgcacattaggtgacgatattaaagaaaaagatagtcaattaaatgaaattgataataaaatgacaggtatcctttgtcgtattccaaatttaataagtgatgatgtacctcaaggtgaatctgatgaagataacgttgaagttaaaaagtggggtacaccacgtgagttttcatttgaaccaaaagcacattgggatattgtagaagaattgaaaatggctgattttgatcgtgcagcaaaagtttcaggtgcgcgttttgtatatttaacaaatgaaggtgcgcaattagagcgtgctttaatgaactatatgattacaaaacatacaacacaacatggttatacagaaatgatggtaccacagcttgtgaacgcagatacaatgtatggtacaggtcaattacctaaatttgaagaagatttatttaaagtagaaaaagaaggattatatacaattccaactgctgaagtaccattaacgaatttctaccgtaatgaaattattcaaccaggtgtacttcctgaaaaattcactggtcaatctgcatgtttccgtagtgaagcaggatcagcaggtagagatacaagaggattaattcgtttacatcaattcgataaagtggaaatggtacgttttgaacaacctgaagattcatggaatgctttagaagaaatgacaacaaatgcagaagcaattctagaagagttaggtttaccataccgtcgtgttattttatgtacaggtgatattggatttagtgcaagcaaaacatatgatatagaagtttggttaccaagctacaatgattataaagaaattagttcatgctcaaactgtacggatttccaagcgcgtcgtgctaacatccgcttcaagcgtgacaaagcagctaaaccagaattagcacatacattaaatggtagtggtttagcagttggacgtacatttgctgctattgttgaaaattaccaaaatgaagatggaacagtaacaattccagaagcattagtaccatttatgggtggtaaaacacaaatttcaaaaccagttaaataa

SEQ ID NO: 192 - DNA, 6850 bp, Staphylococcus aureus
gtgaatgataattttaaaaagcaaccgcatcatttaatatatgaagaattattacaacaaggtattactctaggtattacaactagaggagatggtttaagcgactatcctaaaaatgcttttaatatggcgagatatattgatgatcgcccatataatattactcaacatcaattgcaattagctgaagaaattgcgtttgatagaaaaaattgggtgtttcccatccaaacacatgaaaataaagtcgcttgtattacaaaggatgatataggcacaaatatagacactttaactgatgcgcttcatggtattgatgcgatgtacacatatgatagtaatgtcttattaacgatgtgttatgcagactgtgtaccagtatatttttatagtacaaaacatcattttattgcattggcgcatgcaggttggcgtggtacctatactgaaattgtaaaagaagtgctaaaacatgtgaactttgatttgaaagacttacatgtcgttattggaccatctacatcatcaagttatgaaattaatgatgatattaaaaataaatttgaaacattgccaattgatagtgccaactatattgaaactagaggacgagatcgtcatggtattgatttgaaaaaagccaatgctgaattattaaattattatggtgttcctaaagaaaatatttatacgacagcgtatgctacatctgaacatttagaattatttttctcttatcgattagaaaaaggtcaaacaggacgcatgttagcattcattggtcaacagtaaacaaggaggagatatgtttgcgtgtgaaagataatttacaacaaatctcaacacaaattaatgacaaaagtgaaaaaaataatttttcaacaaaaccaaacgtgattgcagttacaaaatatgttacaatagagcgagctaaagaagcgtatgaggctggaataagacattttggtgagaatagattggaaggcttttttcaaaagaaagaagcattaccatcagatgcggtgattcattttataggatcattacaatctcgaaaagttaaggacgttataaacgacgtagattatttccatgctttagatcgattgagcttagccaaagaaattaacaaacgtgcagaacataaaattaaatgtttcttgcaagtgaacgtttcgggagaagcttctaaacatggtattgctttagaagatgttgatcagtttatagatgatcttaaaaaatatgacaaaatcgaaattgtaggtttaatgacgatggcaccattgacagatgatgaagcatatattagatcgttatttaaacagttacgtttgaaaaaagaagaaatacaacgactcaatttagaatatgcgccttgtgatgaattatcaatgggaatgagtaatgactatcttattgcagttgaagaaggtgcgacgtttgttagaattgggactaaacttgtaggagaagaggagtgagccacttggctttaaaagatttatttagtggattttttgtaatagatgatgaagaggaagtagaagtacctgacaaacaacaacaggtcaatgaagcgccagcaaaagagcagtcacaacaaacaacaaaacaaaacgcaatcaaatcagtccctcaaaaatctgcatcaagatatacaacaacgtcagaagaaaggaataaccgtatgtctaattattcaaaaaataattcacgtaatgttgtaactatgaacaatgctacaccaaacaatgcatcacaagaaagttcaaaaatgtgtttattcgaaccacgtgttttttcagatacacaagatattgctgatgagcttaaaaaccgccgtgcgacacttgtcaatttacaacgtattgataaagtatcagcgaaaagaattattgattttttaagcggtactgtttatgcaatcggtggagatatccaacgtgtaggtactgatattttcttatgtacgcctgataatgtggaagtagctggaagcattacagaccatattgaaaatatggaacattcattcgactaaggagttaacatatggatataaatgtgctagctacaatatttaaatttatcctttttgttgttgaaatttattatttcggcatgattatatatttctttacatcttgggtaccaagtattagagaaactaaggtaggttattttttagcgaaaatatatgaacctttcttacaaccatttagaaaagtaattccacctattggaattatcgacatatcatcaatcgctgcaattatcgttttagtattattccaaaaagggttactccaaatctttaattggattttaattcaattacaataaattaagcgacataacgaggcaagggtacatgatactttagcctcgtttttgatatgtatttttctgaatataagggcaatagatggtattttataatttttttaaggtagtgattaacatagatatttatcaacactttagacaggaagaatacgaattaattgatcagctaacggataaatgtgatcaagcggaacaacattatgcaccagtattaacgcattttttagatccaagagggcaatatatattggaagtgatttgtggcagttatgaagatttaaacgtctctttttatggcgggcctaatgctgaaagaaaaagagcaatcatttcgccgaactattatgaacctaaagaaagtgactttgaattaactttaatggaaatagagtatcctgaaaaattcgtcactttaaaacatcaacatattttagggacattaatgtctttaggtatcgaacgcgaacaagttggagatataattgtgaatgaacgaattcaatttgttttgacaagtagattggaatcatttattatgttagaattacaacgtattaaaggcgcatcagttaaactttatactattccagtaacagatatgatacaatctaatgagaattggaaaaatgaaagtgcaacagttagttctttaaggttagatgttgttattaaagaaatgatacgtaaatcacgtacgattgcgaaacaactaattgaaaaaaaacgtgttaaagtgaatcacactattgttgattcagcagattttcaattacaagcaaatgatttaatatccatccaaggttttggtagagcacacattactgacttaggtggtaaaactaaaaaagataaaacgcacattacctatagaacattattcaaatagtaatgatttaaggaggataacaaatgccttttacaccaaatgaaattaagaataaagagttttcacgtgtaaagaatggtttagaacctactgaagttgctaattttttggagcaactaagcactgaaattgaacgtcttaaagaagataaaaaacaacttgaaaaagtaatcgaagagagagatactaatattaagtcttatcaagacgtgcatcaatctgtaagtgatgctttgatacaagctcaaaaagctggtgaagaaactaagcaagctgcagagaaacaagctgaagcgattatagctaaggcagaagcgcaagctaatcaaatggttggtgacgcggtagaaaaagcacgccgtttagcattccagactgaagatatgaaacgtcaatcaaaagtatttagatcgcgtttccgtatgttagttgaagcgcaattagacttattaaaaaacgaagattgggattacttgttgaattatgatttagacgctgaacaagtgacgcttgaaaatattcatcatttgcatgaaaatgatttaaagccagatgaagttgcagcaaatgcacaaaataatgcatcaaatacaccagacaataatcaacaatccaatgattcagaaacaactaagaagtaagaattaaataaagacagacgcgtaatatacatttaacttttcacagcgaattaggtaatggtgagagcctagtaaaagcatgtatgttatatcactggctttttaatatttaaataatgtaatgagagaactctaagttgagttaataagggtggtaccgcgagcaatcgtcccttttaatttaacttagagttttttaaatttttaaggagtgaaaaaaatggattacaaagaaacgttattaatgcctaaaacagatttcccaatgcgaggtggtttaccaaacaaggaaccgcaaattcaagaaaaatgggatgcagaagatcaataccataaagcgttagaaaaaaataaaggtaacgaaacattcattttacatgatggcccaccatacgcgaatggtaacttacatatgggacatgccttgaacaaaattttaaaagactttattgtacgttataaaactatgcaagggttctatgcaccatacgtaccaggttgggatacacatggtttaccaattgaacaagcattaacgaaaaaaggtgttgaccgaaagaaaatgtcaacagctgaattccgtgagaaatgtaaagaatttgctttagaacaaattgaattacagaaaaaagattttagacgtttaggtgttcgtggtgactttaatgatccatatattacattaaaacctgaatacgaagctgcacaaattcgtatttttggagaaatggcagataaaggtttaatttataaaggtaaaaagccagtttattggtctccttcaagtgagtcttcattagcagaagcagaaattgaatatcacgataaacgttcagcatcaatttacgttgcatttgacgttaaagatgacaaaggtgtcgttgatgcagatgctaaatttattatctggacaacaacgccatggacaattccatcaaatgttgcgattaccgttcatcctgaattaaaatatggtcaatacaatgtaaatggcgaaaaatatattattgcagaagccttgtctgacgctgtagcagaagcactggattgggataaagcatcaatcaaattagaaaaagaatacacaggtaaagaattagagtatgttgtagcacaacatccattcttagacagagaatcgttagtgattaatggtgatcatgttactacagatgctggtacaggttgtgtacatacagcaccaggtcacggggaagatgactatattgttggtcaaaaatatgaattgccagtaattagtccaatcgatgataaaggtgtatttactgaagaaggcggccaatttgaagggatgttctatgataaagctaataaagccgttactgatttattaacagaaaaaggtgcactattaaaattagactttattacacatagctatccacacgactggagaacaaaaaaacctgtaatcttccgtgctacaccacaatggtttgcctcaatcagtaaagtaagacaagatattttagatgcaatcgaaaatacaaacttcaaagtaaattggggtaaaacacgtatttacaatatggttcgtgaccgtggcgaatgggttatttctcgtcaacgtgtgtggggtgtaccgttaccagtattttatgctgaaaatggcgaaattatcatgacgaaagaaacagtgaatcatgttgctgatttatttgcagaacacggttcaaatatttggtttgaaagagaagcgaaagacttactaccagaaggatttacacatccaggcagccctaacggtacatttactaaagaaacagacattatggacgtttggtttgattctggttcatcacaccgtggcgtgttggaaacaagaccggaattaagtttcccagcggatatgtatttagaaggtagtgaccaatatcgtggttggttcaactcttctatcacaacttcagttgctacaagaggagtatcaccttataaattcttactttctcatggttttgttatggacggtgaaggtaagaaaatgagtaaatctttaggtaatgtgattgtacctgaccaagtggttaaacaaaaaggtgctgatattgcgagactttgggtaagtagtacggactatttagctgatgttagaatttctgatgaaattttaaaacaaacatctgatgtttatcgtaaaatcagaaatacattaagatttatgttaggtaacattaacgatttcaatcctgacacagatagcattcctgaatcagagttattagaagtggatcgttacttgctaaatcgtttacgtgaatttactgcaagtacgattaacaactatgaaaactttgactacttaaatatttatcaagaagttcaaaactttatcaatgttgagttaagtaatttctatttggattacggtaaagatattttatatattgaacaacgtgattctcatatccgtcgtagtatgcaaacagtgttatatcaaattttagttgatatgacgaagttgttagcaccaatcttagtgcatacagctgaagaagtttggtctcatacaccacatgttaaagaagaaagtgttcacttagcagacatgcctaaagttgtagaagtagatcaagctttattggataaatggcgtacatttatgaatttacgtgatgatgtgaaccgtgcattagaaactgctcgtaatgaaaaagttattggtaaatcattagaagctaaagttacgattgctagtaacgataaatttaatgcatctgaattcttaacttcatttgatgcattacatcaattatttatcgtgtcacaagttaaagttgtagataagttagatgatcaggcaacagcttatgaacatggtgatattgtcatcgaacatgcagatggtgaaaaatgtgaaagatgttggaactattcagaggatcttggtgctgttgatgaattgacgcatctatgtccacgatgccaacaagttgtaaaatcactggtataa

SEQ ID NO: 193 - DNA, 3876 bp, Staphylococcus aureus
gtgaatgataattttaaaaagcaaccgcatcatttaatatatgaagaattattacaacaaggtattactctaggtattacaactagaggagatggtttaagcgactatcctaaaaatgcttttaatatggcgagatatattgatgatcgcccatataatattactcaacatcaattgcaattagctgaagaaattgcgtttgatagaaaaaattgggtgtttcccatccaaacacatgaaaataaagtcgcttgtattacaaaggatgatataggcacaaatatagacactttaactgatgcgcttcatggtattgatgcgatgtacacatatgatagtaatgtcttattaacgatgtgttatgcagactgtgtaccagtatatttttatagtacaaaacatcattttattgcattggcgcatgcaggttggcgtggtacctatactgaaattgtaaaagaagtgctaaaacatgtgaactttgatttgaaagacttacatgtcgttattggaccatctacatcatcaagttatgaaattaatgatgatattaaaaataaatttgaaacattgccaattgatagtgccaactatattgaaactagaggacgagatcgtcatggtattgatttgaaaaaagccaatgctgaattattaaattattatggtgttcctaaagaaaatatttatacgacagcgtatgctacatctgaacatttagaattatttttctcttatcgattagaaaaaggtcaaacaggacgcatgttagcattcattggtcaacagtaaacaaggaggagatatgtttgcgtgtgaaagataatttacaacaaatctcaacacaaattaatgacaaaagtgaaaaaaataatttttcaacaaaaccaaacgtgattgcagttacaaaatatgttacaatagagcgagctaaagaagcgtatgaggctggaataagacattttggtgagaatagattggaaggcttttttcaaaagaaagaagcattaccatcagatgcggtgattcattttataggatcattacaatctcgaaaagttaaggacgttataaacgacgtagattatttccatgctttagatcgattgagcttagccaaagaaattaacaaacgtgcagaacataaaattaaatgtttcttgcaagtgaacgtttcgggagaagcttctaaacatggtattgctttagaagatgttgatcagtttatagatgatcttaaaaaatatgacaaaatcgaaattgtaggtttaatgacgatggcaccattgacagatgatgaagcatatattagatcgttatttaaacagttacgtttgaaaaaagaagaaatacaacgactcaatttagaatatgcgccttgtgatgaattatcaatgggaatgagtaatgactatcttattgcagttgaagaaggtgcgacgtttgttagaattgggactaaacttgtaggagaagaggagtgagccacttggctttaaaagatttatttagtggattttttgtaatagatgatgaagaggaagtagaagtacctgacaaacaacaacaggtcaatgaagcgccagcaaaagagcagtcacaacaaacaacaaaacaaaacgcaatcaaatcagtccctcaaaaatctgcatcaagatatacaacaacgtcagaagaaaggaataaccgtatgtctaattattcaaaaaataattcacgtaatgttgtaactatgaacaatgctacaccaaacaatgcatcacaagaaagttcaaaaatgtgtttattcgaaccacgtgttttttcagatacacaagatattgctgatgagcttaaaaaccgccgtgcgacacttgtcaatttacaacgtattgataaagtatcagcgaaaagaattattgattttttaagcggtactgtttatgcaatcggtggagatatccaacgtgtaggtactgatattttcttatgtacgcctgataatgtggaagtagctggaagcattacagaccatattgaaaatatggaacattcattcgactaaggagttaacatatggatataaatgtgctagctacaatatttaaatttatcctttttgttgttgaaatttattatttcggcatgattatatatttctttacatcttgggtaccaagtattagagaaactaaggtaggttattttttagcgaaaatatatgaacctttcttacaaccatttagaaaagtaattccacctattggaattatcgacatatcatcaatcgctgcaattatcgttttagtattattccaaaaagggttactccaaatctttaattggattttaattcaattacaataaattaagcgacataacgaggcaagggtacatgatactttagcctcgtttttgatatgtatttttctgaatataagggcaatagatggtattttataatttttttaaggtagtgattaacatagatatttatcaacactttagacaggaagaatacgaattaattgatcagctaacggataaatgtgatcaagcggaacaacattatgcaccagtattaacgcattttttagatccaagagggcaatatatattggaagtgatttgtggcagttatgaagatttaaacgtctctttttatggcgggcctaatgctgaaagaaaaagagcaatcatttcgccgaactattatgaacctaaagaaagtgactttgaattaactttaatggaaatagagtatcctgaaaaattcgtcactttaaaacatcaacatattttagggacattaatgtctttaggtatcgaacgcgaacaagttggagatataattgtgaatgaacgaattcaatttgttttgacaagtagattggaatcatttattatgttagaattacaacgtattaaaggcgcatcagttaaactttatactattccagtaacagatatgatacaatctaatgagaattggaaaaatgaaagtgcaacagttagttctttaaggttagatgttgttattaaagaaatgatacgtaaatcacgtacgattgcgaaacaactaattgaaaaaaaacgtgttaaagtgaatcacactattgttgattcagcagattttcaattacaagcaaatgatttaatatccatccaaggttttggtagagcacacattactgacttaggtggtaaaactaaaaaagataaaacgcacattacctatagaacattattcaaatagtaatgatttaaggaggataacaaatgccttttacaccaaatgaaattaagaataaagagttttcacgtgtaaagaatggtttagaacctactgaagttgctaattttttggagcaactaagcactgaaattgaacgtcttaaagaagataaaaaacaacttgaaaaagtaatcgaagagagagatactaatattaagtcttatcaagacgtgcatcaatctgtaagtgatgctttgatacaagctcaaaaagctggtgaagaaactaagcaagctgcagagaaacaagctgaagcgattatagctaaggcagaagcgcaagctaatcaaatggttggtgacgcggtagaaaaagcacgccgtttagcattccagactgaagatatgaaacgtcaatcaaaagtatttagatcgcgtttccgtatgttagttgaagcgcaattagacttattaaaaaacgaagattgggattacttgttgaattatgatttagacgctgaacaagtgacgcttgaaaatattcatcatttgcatgaaaatgatttaaagccagatgaagttgcagcaaatgcacaaaataatgcatcaaatacaccagacaataatcaacaatccaatgattcagaaacaactaagaagtaa

SEQ ID NO: 194 - DNA, 2754 bp, Staphylococcus aureus
atggattacaaagaaacgttattaatgcctaaaacagatttcccaatgcgaggtggtttaccaaacaaggaaccgcaaattcaagaaaaatgggatgcagaagatcaataccataaagcgttagaaaaaaataaaggtaacgaaacattcattttacatgatggcccaccatacgcgaatggtaacttacatatgggacatgccttgaacaaaattttaaaagactttattgtacgttataaaactatgcaagggttctatgcaccatacgtaccaggttgggatacacatggtttaccaattgaacaagcattaacgaaaaaaggtgttgaccgaaagaaaatgtcaacagctgaattccgtgagaaatgtaaagaatttgctttagaacaaattgaattacagaaaaaagattttagacgtttaggtgttcgtggtgactttaatgatccatatattacattaaaacctgaatacgaagctgcacaaattcgtatttttggagaaatggcagataaaggtttaatttataaaggtaaaaagccagtttattggtctccttcaagtgagtcttcattagcagaagcagaaattgaatatcacgataaacgttcagcatcaatttacgttgcatttgacgttaaagatgacaaaggtgtcgttgatgcagatgctaaatttattatctggacaacaacgccatggacaattccatcaaatgttgcgattaccgttcatcctgaattaaaatatggtcaatacaatgtaaatggcgaaaaatatattattgcagaagccttgtctgacgctgtagcagaagcactggattgggataaagcatcaatcaaattagaaaaagaatacacaggtaaagaattagagtatgttgtagcacaacatccattcttagacagagaatcgttagtgattaatggtgatcatgttactacagatgctggtacaggttgtgtacatacagcaccaggtcacggggaagatgactatattgttggtcaaaaatatgaattgccagtaattagtccaatcgatgataaaggtgtatttactgaagaaggcggccaatttgaagggatgttctatgataaagctaataaagccgttactgatttattaacagaaaaaggtgcactattaaaattagactttattacacatagctatccacacgactggagaacaaaaaaacctgtaatcttccgtgctacaccacaatggtttgcctcaatcagtaaagtaagacaagatattttagatgcaatcgaaaatacaaacttcaaagtaaattggggtaaaacacgtatttacaatatggttcgtgaccgtggcgaatgggttatttctcgtcaacgtgtgtggggtgtaccgttaccagtattttatgctgaaaatggcgaaattatcatgacgaaagaaacagtgaatcatgttgctgatttatttgcagaacacggttcaaatatttggtttgaaagagaagcgaaagacttactaccagaaggatttacacatccaggcagccctaacggtacatttactaaagaaacagacattatggacgtttggtttgattctggttcatcacaccgtggcgtgttggaaacaagaccggaattaagtttcccagcggatatgtatttagaaggtagtgaccaatatcgtggttggttcaactcttctatcacaacttcagttgctacaagaggagtatcaccttataaattcttactttctcatggttttgttatggacggtgaaggtaagaaaatgagtaaatctttaggtaatgtgattgtacctgaccaagtggttaaacaaaaaggtgctgatattgcgagactttgggtaagtagtacggactatttagctgatgttagaatttctgatgaaattttaaaacaaacatctgatgtttatcgtaaaatcagaaatacattaagatttatgttaggtaacattaacgatttcaatcctgacacagatagcattcctgaatcagagttattagaagtggatcgttacttgctaaatcgtttacgtgaatttactgcaagtacgattaacaactatgaaaactttgactacttaaatatttatcaagaagttcaaaactttatcaatgttgagttaagtaatttctatttggattacggtaaagatattttatatattgaacaacgtgattctcatatccgtcgtagtatgcaaacagtgttatatcaaattttagttgatatgacgaagttgttagcaccaatcttagtgcatacagctgaagaagtttggtctcatacaccacatgttaaagaagaaagtgttcacttagcagacatgcctaaagttgtagaagtagatcaagctttattggataaatggcgtacatttatgaatttacgtgatgatgtgaaccgtgcattagaaactgctcgtaatgaaaaagttattggtaaatcattagaagctaaagttacgattgctagtaacgataaatttaatgcatctgaattcttaacttcatttgatgcattacatcaattatttatcgtgtcacaagttaaagttgtagataagttagatgatcaggcaacagcttatgaacatggtgatattgtcatcgaacatgcagatggtgaaaaatgtgaaagatgttggaactattcagaggatcttggtgctgttgatgaattgacgcatctatgtccacgatgccaacaagttgtaaaatcactggtataa

SEQ ID NO: 195-200 - skipped (6 entries)

SEQ ID NO: 201 - DNA, 1935 bp, Staphylococcus aureus
atggtgactgcattgtcagatgtaaacaacacggataattatggtgctgggcaaatacaagtattagaaggtttagaagcagtacgtaaaagaccaggtatgtatataggatcgacttcagagagaggtttgcaccatttagtgtgggaaattgtcgataatagtatcgatgaagcattagctggttatgcaaataaaattgaagttgttattgaaaaagataactggattaaagtaacggataacggacgtggtatcccagttgatattcaagaaaaaatgggacgtccagctgtcgaagttattttaactgttttacatgctggtggtaaattcggcggtggcggatacaaagtatctggtggtttacatggtgttggttcatcagttgtaaacgcattgtcacaagacttagaagtatatgtacacagaaatgagactatatatcatcaagcatataaaaaaggtgtacctcaatttgacttaaaagaagttggcacaactgataagacaggtactgtcattcgttttaaagcagatggagaaatcttcacagagacaactgtatacaactatgaaacattacagcagcgtattagagagcttgctttcttaaacaaaggaattcaaatcacattaagagatgaacgtgatgaagaaaacgttagagaagactcctatcactatgagggcggtattaaatcgtacgttgagttattgaacgaaaataaagaacctattcatgatgagccaatttatattcatcaatctaaagatgatattgaagtagaaattgcgattcaatataactcaggatatgccacaaatcttttaacttacgcaaataacattcatacgtatgaaggtggtacgcatgaagacggattcaaacgtgcattaacgcgtgtcttaaatagttatggtttaagtagcaagattatgaaagaagaaaaagatagactttctggtgaagatacacgtgaaggtatgacagcaattatatctatcaaacatggtgatcctcaattcgaaggtcaaacgaagacaaaattaggtaattctgaagtgcgtcaagttgtagataaattattctcagagcactttgaacgatttttatatgaaaatccacaagtcgcacgtacagtggttgaaaaaggtattatggcggcacgtgcacgtgttgctgcgaaaaaagcgcgtgaagtaacacgtcgtaaatcagcgttagatgtagcaagtcttccaggtaaattagccgattgctctagtaaaagtcctgaagaatgtgagattttcttagtcgaaggggactctgccggggggtctacaaaatctggtcgtgactctagaacgcaggcgattttaccattacgaggtaagatattaaatgttgaaaaagcacgattagatagaattttgaataacaatgaaattcgtcaaatgatcacagcatttggtacaggaatcggtggcgactttgatctagcgaaagcaagatatcacaaaatcgtcattatgactgatgccgatgtggatggagcgcatattagaacattgttattaacattcttctatcgatttatgagaccgttaattgaagcaggctatgtgtatattgcacagccaccgttgtataaactgacacaaggtaaacaaaagtattatgtatacaatgatagggaacttgataaacttaaatctgaattgaatccaacaccaaaatggtctattgcacgatacaaaggtcttggagaaatgaatgcagatcaattatgggaaacaacaatgaaccctgagcaccgcgctcttttacaagtaaaacttgaagatgcgattgaagcggaccaaacatttgaaatgttaatgggtgacgttgtagaaaaccgtagacaatttatagaagataatgcagtttatgcaaacttagacttctaa

SEQ ID NO: 202 - DNA, 2670 bp, Staphylococcus aureus
atggctgaattacctcaatcaagaataaatgaacgaaatattaccagtgaaatgcgtgaatcatttttagattatgcgatgagtgttatcgttgctcgtgcattgccagatgttcgtgacggtttaaaaccagtacatcgtcgtatactatatggattaaatgaacaaggtatgacaccggataaatcatataaaaaatcagcacgtatcgttggtgacgtaatgggtaaatatcaccctcatggtgacttatctatttatgaagcaatggtacgtatggctcaagatttcagttatcgttatccgcttgttgatggccaaggtaactttggttcaatggatggagatggcgcagcagcaatgcgttatactgaagcgcgtatgactaaaatcacacttgaactgttacgtgatattaataaagatacaatagattttatcgataactatgatggtaatgaaagagagccgtcagtcttacctgctcgattccctaacttgttagccaatggagcatcaggtatagcggtaggtatggcaacgaatattccaccacataacttaacagaattaatcaatggtgtacttagcttaagtaagaaccctgatatttcaattgctgagttaatggaggatattgaaggtcctgatttcccaactgctggacttattttaggtaagagtggtattagacgtgcatatgaaacaggtcgtggttcaattcaaatgcgttctcgtgcagttattgaagaacgtggaggcggacgtcaacgtattgttgtcactgaaattcctttccaagtgaataaggctcgtatgattgaaaaaattgcagagctcgttcgtgacaagaaaattgacggtatcactgatttacgtgatgaaacaagtttacgtactggtgtgcgtgtcgttattgatgtgcgtaaggatgcaaatgctagtgtcattttaaataacttatacaaacaaacacctcttcaaacatcatttggtgtgaatatgattgcacttgtaaatggtagaccgaagcttattaatttaaaagaagcgttggtacattatttagagcatcaaaagacagttgttagaagacgtacgcaatacaacttacgtaaagctaaagatcgtgcccacattttagaaggattacgtatcgcacttgaccatatcgatgaaattatttcaacgattcgtgagtcagatacagataaagttgcaatgaaaagcttgcaacaacgcttcaaactttctgaaaaacaagctcaagctattttagacatgcgtttaagacgtctaacaggtttagagagagacaaaattgaagctgaatataatgagttattaaattatattagtgaattagaaacaatcttagctgatgaagaagtattactacaattagttagagatgaattaacagaaattcgagatcgtttcggtgatgatcgtcgtactgaaatccaattaggtggatttgaagatttagaagatgaagatctcattccagaagaacaaattgtaattacactaagccataataactacattaaacgtttgccggtatctacatatcgtgctcaaaaccgtggtggtcgtggtgttcaaggtatgaatacattggaagaagattttgtcagtcaattggtaactttaagtacacatgaccatgtattgttctttactaacaaaggtcgtgtatacaaacttaaaggttatgaagtgcctgagttatcaagacagtctaaaggtattcctgtagtgaatgctattgaacttgaaaatgatgaagtcattagtacaatgattgctgttaaagaccttgaaagtgaagacaacttcttagtgtttgcaactaaacgtggtgtcgttaaacgttcagcattaagtaacttctcaagaataaatagaaatggtaagattgcgatttcgttcagagaagatgatgagttaattgcagttcgcttaacaagtggtcaagaagatatcttgattggtacatcacatgcatcattaattcgattccctgaatcaacattacgtcctttaggccgtacagcaacgggtgtgaaaggtattacacttcgtgaaggtgacgaagttgtagggcttgatgtagctcatgcaaacagtgttgatgaagtattagtagttactgaaaatggttatggtaaacgtacgccagttaatgactatcgtttatcaaatcgtggtggtaaaggtattaaaacagctacgattactgagcgtaatggtaatgttgtatgtatcactacagtaactggtgaagaagatttaatgattgttactaatgcaggtgtcattattcgactagatgttgcagatatttctcaaaatggtcgtgcagcacaaggtgttcgcttaattcgcttaggtgatgatcaatttgtttcaacggttgctaaagtaaaagaagatgcagaagatgaaacgaatgaagatgagcaatctacttcaactgtatctgaagatggtactgaacaacaacgtgaagcggttgtaaatgatgaaacaccaggaaatgcaattcatactgaagtgattgattcagaagaaaatgatgaagatggacgtattgaagtaagacaagatttcatggatcgtgttgaagaagatatacaacaatcatcagatgaagatgaagaataa

SEQ ID NO: 203 - DNA, 1641 bp, Staphylococcus aureus
gtgtcgaaagaaatagattggagaaaatccgttgtatatcaaatttatcctaagtcgtttaatgatacgacggggaatggtataggagatatcaacggaattatagaaaaattggattatatcaagttattgggtgttgattatatttggttaacaccagtgtatgaatcacctatgaatgataatggctatgatatcagcaattatttagaaatcaatgaagcctttggaacgatggatgattttgaaaagttaatcaaagttgctcatcaaaaagacttgaaagtgatgttagatattgttattaatcatacgtcgacggagcatgaatggtttaaagaagcccgtaaatctaaagataacccttatagagattattactttttcagatcatctgaagacgggccgccaacaaattggcattctaaattcggtggtaatgcatggaagtatgattctgagacagatgaatattatttacatttatttgatgtcagtcaagctgatttaaattgggataatccggaagtacgtcaatcgttatatcgcatagtcaatcattggatagacttcggcgttgatggttttcgatttgatgtcattaacttaatttctaaaggtgaatttaaggactctgacaaaataggtaaagaattttatacggatggtcctagagtgcatgagtttctgcatgaattaaatcgtcaaacgtttggtaacactgacatgatgactgtaggagaaatgtcttcgacgacgattgaaaattgtattaagtatacacaaccagaacgccaagaattgaatagtgtttttaattttcatcatctaaaggttgattatgttgatggtgaaaagtggacaaatgcgaagcttgattttcataagttaaaggaaattctgatgcaatggcaacgaggtatttatgacggtggcggatggaacgcgattttctggtgtaatcatgatcagccacgggtagtgtctagatttggtgatgatacgtcggaagagatgaggatacaaagtgctaaaatgttagctatcgcactgcatatgttgcaagggacgccatatatttaccaaggtgaagaaattggtatgacggacccacattttacatcaatagcacaatatcgtgatgttgaatcgattaatgcctaccatcagttgctaagtgaagggcatgctgaagcggatgtattagcgattttaggacagaagtcacgagacaattcgagaacgcctatgcaatggagtgatgatgttaatgctggatttacagctggtaagccttggattgatatttcggaaaattatcatcaggtcaacgttagacaagcacttcagaataaagagtctattttctatacgtatcaaaaattaatacaattaagacatacgcatgatattattacgtatggagacattgtgccacgttttatggatcatgatcatttatttgtttatgaacgtcattataagaatcaacaatggctagtaattgcgaatttctcagcatcggctgttgatttgccagaaggattggctagagaaggttgtgttgtgattcaaacaggcacagtggaaaataatacgataagcgggtttggtgcaattgtaatcgaaacaaacgcgtaa

SEQ ID NO: 204 - DNA, 1698 bp, Staphylococcus aureus
ttgaattatcaagccttatatcgtatgtacagaccccaaagtttcgaggatgtcgtcggacaagaacatgtcacgaagacattgcgcaatgcgatttcgaaagaaaaacagtcgcatgcttatatttttagtggtccgagaggtacggggaaaacgagtattgccaaagtgtttgctaaagcaatcaactgtctaaatagcactgatggagaaccttgtaatgaatgtcatatttgtaaaggcattacgcaggggactaattcagatgtgatagaaattgatgctgctagtaataatggcgttgatgaaataagaaatattagagacaaagttaaatatgcaccaagtgaatcgaaatataaagtttatattatagatgaggtgcacatgctaacaacaggtgcttttaatgcccttttaaagacgttagaagaacctccagcacacgctatttttatattggcaacgacagaaccacataaaatccctccaacaatcatttctagggcacaacgttttgattttaaagcaattagcctagatcaaattgttgaacgtttaaaatttgtagcagatgcacaacaaattgaatgtgaagatgaagccttggcatttatcgctaaagcgtctgaagggggtatgcgtgatgcattaagtattatggatcaggctattgcatttggtgatggtacgttaacattgcaagatgcgttgaatgtcacaggtagcgtacatgatgaagcgttggatcacttgtttgatgatattgtacaaggtgacgtacaagcatcttttaaaaaataccatcagtttataacagagggtaaagaagtgaatcgcctaataaatgatatgatttattttgtcagagatacgattatgaataaaacatctgagaaagatactgagtatcgagcactgatgaacttagaattagatatgttatatcaaatgattgatcttattaatgatacattagtgtcgattcgttttagtgtgaatcaaaacgttcattttgaagtgttgttagtaaaattagctgagcagattaagggtcaaccacaagtgattgcgaatgtagctgaaccagcacaaattgcttcatcgccaaacacagatgtattgttgcaacgtatggaacagttagagcaagaattaaaaacactaaaagcacaaggagtgagtgtcgctcctgctcaaaaatcttcgaaaaagcctgcgagaggcatacaaaaatctaaaaatgcattttcaatgcaacaaattgcaaaagtgctagataaagcgaataaggcagatatcaaattgttgaaagatcattggcaagaagtgattgatcatgccaaaaacaatgataaaaaatcactcgttagtttattgcaaaattcggaacctgtggcggcaagtgaagatcacgtacttgtgaaatttgaggaagagatccattgtgaaatcgtcaataaagacgacgagaaacgtagtagtatagaaagtgttgtatgtaatatcgttaataaaaacgttaaagttgttggtgtaccatcagatcaatggcaaagagttcgaacggagtatttacaaaatcgtaaaaacgaaggcgatgatatgccaaagcaacaagcacaacaaacagatattgctcaaaaagcaaaagatcttttcggtgaagaaactgtacatgtgatagatgaagagtga

SEQ ID NO: 205 - DNA, 318 bp, Staphylococcus aureus
atgcgcggtggcggaaacatgcaacaaatgatgaaacaaatgcaaaaaatgcaaaagaaaatggctcaagaacaagaaaaacttaaagaagagcgtattgtaggaacagctggcggtggcatggttgcagttactgtaactggtcataaagaagttgtcgacgttgaaatcaaagaagaagctgtagacccagacgatattgaaatgctacaagacttagtgttagcagctactaatgaagcgatgaataaagctgatgagcttactcaagaacgtttaggtaaacatactcaaggcttaaacatccctggaatgtga

SEQ ID NO: 206 - DNA, 618 bp, Staphylococcus aureus
atgtcagcttttataacttttgagggcccagaaggctctggaaaaacaactgtaattaatgaagtttaccatagattagtaaaagattatgatgtcattatgactagagaaccaggtggtgttcctactggtgaagaaatacgtaaaattgtattagaaggcaatgatatggacattagaactgaagcaatgttatttgctgcatctagaagagaacatcttgtattaaaggtcataccagctttaaaagaaggtaaggttgtgttgtgtgatcgctatatcgatagttcattagcttatcaaggttatgctagagggattggcgttgaagaagtaagagcattaaacgaatttgcaataaatggattatatccagacttgacgatttatttaaatgttagtgctgaagtaggtcgcgaacgtattattaaaaattcaagagatcaaaatagattagatcaagaagatttaaagtttcacgaaaaagtaattgaaggttaccaagaaatcattcataatgaatcacaacggttcaaaagcgttaatgcagatcaacctcttgaaaatgttgttgaagacacgtatcaaactatcatcaaatatttagaaaagatatga

SEQ ID NO: 207 - DNA, 927 bp, Staphylococcus aureus
atggatgaacagcaacaattgacgaatgcatatcattcaaataaattatcgcatgcctatttatttgaaggtgatgatgcacaaacgatgaaacaagttgcgattaattttgcaaagcttattttatgtcaaacagatagtcaatgtgaaacaaaggttagtacatataatcatccagactttatgtatatatcaacaactgagaatgcaattaagaaagaacaagttgaacaacttgtgcgtcatatgaatcaacttcctatagaaagcacaaataaagtgtacatcattgaagactttgaaaagttaactgttcaaggggaaaacagtatcttgaaatttcttgaagaaccaccggacaatacgattgctattttattgtctacaaaacctgagcaaattttagacacaatccattcaaggtgtcagcatgtgtatttcaagcctattgataaagaaaagtttataaatagattagttgaacaaaacatgtctaagccagtagctgaaatgattagtacttatactacgcaaatagataatgcaatagctttaaatgaagaatttgatttattagcattaaggaaatcagttatacgttggtgtgaattgttgcttactaacaagccaatggcacttataggtattattgatttattgaaacaggctaaaaataaaaaactgcaatctttaactattgcagctgtgaatggtttcttcgaagatatcatacatacaaaggtaaatgtagaggataaacaaatatatagtgatttaaaaaatgatattgatcaatatgcgcaaaagttgtcgtttaatcaattaattttgatgtttgatcaactgacggaagcacataagaaattgaatcaaaatgtaaatccaacgcttgtatttgaacaaatcgtaattaagggtgtgagttag

SEQ ID NO: 208 - DNA, 840 bp, Staphylococcus aureus
atggctgtattatatttagtgggcacaccaattggtaatttagcagatattacttatagagcagttgatgtattgaaacgtgttgatatgattgcttgtgaagacactagagtaactagtaagctgtgtaatcattatgatattccaactccattaaagtcatatcacgaacataacaaggataagcagactgcttttatcattgaacagttagaattaggtcttgacgttgcgctcgtatctgatgctggattgcccttaattagtgatcctggatacgaattagtagtggcagccagagaagctaatattaaagtagagactgtgcctggacctaatgctgggctgacggctttgatggctagtggattaccttcatatgtatatacatttttaggatttttgccacgaaaagagaaagaaaaaagtgctgtattagagcaacgtatgcatgaaaatagcacattaattatatacgaatcaccgcatcgtgtgacagatacattaaaaacaattgcaaagatagatgcaacacgacaagtatcactagggcgtgaattaactaagaagttcgaacaaattgtaactgatgatgtaacacaattacaagcattgattcagcaaggcgatgtaccattgaaaggcgaattcgttatcttaattgaaggtgctaaagcgaacaatgagatatcgtggtttgatgatttatctatcaatgagcatgttgatcattatattcaaacttcacagatgaaaccaaaacaagctattaaaaaagttgctgaagaacgacaacttaaaacgaatgaagtatataatatttatcatcaaataagttaa

SEQ ID NO: 209 - DNA, 1974 bp, Staphylococcus aureus
atggctaaagaaacattttatataacaaccccaatatactatcctagtgggaatttacatataggacatgcatattctacagtggctggagatgttattgcaagatataagagaatgcaaggatatgatgttcgttatttgactggaacggatgaacacggtcaaaaaattcaagaaaaagctcaaaaagctggtaagacagaaattgaatatttggatgagatgattgctggaattaaacaattgtgggctaagcttgaaatttcaaatgatgattttatcagaacaactgaagaacgtcataaacatgtcgttgagcaagtgtttgaacgtttattaaagcaaggtgatatctatttaggtgaatatgaaggttggtattctgttccggatgaaacatactatacagagtcacaattagtagacccacaatacgaaaacggtaaaattattggtggcaaaagtccagattctggacacgaagttgaactagttaaagaagaaagttatttctttaatattagtaaatatacagaccgtttattagagttctatgaccaaaatccagattttatacaaccaccatcaagaaaaaatgaaatgattaacaacttcattaaaccaggacttgctgatttagctgtttctcgtacatcatttaactggggtgtccatgttccgtctaatccaaaacatgttgtttatgtttggattgatgcgttagttaactatatttcagcattaggctatttatcagatgatgagtcactatttaacaaatactggccagcagatattcatttaatggctaaggaaattgtgcgattccactcaattatttggcctattttattgatggcattagacttaccgttacctaaaaaagtctttgcacatggttggattttgatgaaagatggaaaaatgagtaaatctaaaggtaatgttgtagaccctaatattttaattgatcgctatggtttagatgctacacgttattatctaatgcgtgaattaccatttggttcagatggcgtatttacacctgaagcatttgttgagcgtacaaatttcgatctagcaaatgacttaggtaacttagtaaaccgtacgatttctatggttaataagtactttgatggcgaattaccagcgtatcaaggtccacttcatgaattagatgaagaaatggaagctatggctttagaaacagtgaaaagctacactgaaagcatggaaagtttgcaattttctgtggcattatctacggtatggaagtttataagtagaacgaataagtatattgacgaaacaacgccttgggtattagctaaggacgatagccaaaaagatatgttaggcaatgtaatggctcacttagttgaaaatattcgttatgcagctgtattattacgtccattcttaacacatgcgccgaaagagatttttgaacaattgaacataaacaatcctcaatttatggaatttagtagtttagagcaatatggtgtgcttactgagtcaattatggttactgggcaacctaaacctattttcccaagattggatagcgaagcggaaattgcatatatcaaagaatcaatgcaaccgcctgctactgaagaggaaaaagaagagattcctagcaaacctcaaattgatattaaagactttgataaagttgaaattaaggcagcaacgattattgatgctgaacatgttaagaagtcagataagcttttaaaaattcaagtagacttagattctgaacaaagacaaattgtatcaggaattgccaaattctatacaccagatgatattattggtaaaaaagtagcagttgttactaacctgaaaccagctaaattaatgggacaaaaatctgaaggtatgatattatctgctgaaaaagatggtgtattaaccttagtaagtttaccaagtgcaattccaaatggtgcagtgattaaataa

SEQ ID NO: 210 - DNA, 573 bp, Staphylococcus aureus
atgaaatgtattgtaggtctaggtaatataggtaaacgttttgaacttacaagacataatatcggctttgaagtcgttgattatattttagagaaaaataatttttcattagataaacaaaagtttaaaggtgcatatacaattgaacgaatgaacggagataaagtgttatttatcgaaccaatgacaatgatgaatttgtcaggagaagcagttgcaccgattatggattattacaatgttaatccagaagatttaattgtcttatatgatgatttagatttagaacaaggacaagttcgcttaagacaaaaaggaagtgcgggcggtcacaatggtatgaaatcaattattaaaatgcttggtacagaccaatttaaacgtattcgtattggtgtgggaagaccaacgaatggtatgacggtacctgattatgttttacaacgcttttcaaatgatgaaatggtaacgatggaaaaagttatcgaacacgcagcacgcgcaattgaaaagtttgttgaaacatcacgatttgaccatgttatgaatgaatttaatggtgaagtgaaataa

SEQ ID NO: 211 - DNA, 264 bp, Staphylococcus aureus
atgagattagataaatatttaaaagtatcacggttaataaagcgacgtacgctagcaaaagaagtaagtgatcaaggtagaattacaataaatggtaatgttgctaaagctggatcggatgttaaagttgaagatgtgctgacgattcgctttggtcaaaaattagtaacagttaaagtaactgcattaaatgaacatgcatctaaagataacgcgaagggcatgtatgaaatcattgaagagcgtcgacttgaagaagcgtaa

SEQ ID NO: 212 - DNA, 393 bp, Staphylococcus aureus
atgaaaaataaagtagaacatatagaaaatcagtacacgtcgcaagagaacaagaaaaaacaacgtcaaaaaatgaaaatgcgtgttgttcgtaggcgtattacagtatttgcgggcgtattacttgcgataattgttgttttatcaatcttgcttgttgtccaaaaacatcgcaatgatattgatgcacaggagcgaaaagcgaaagaagcacagtttcaaaagcaacaaaatgaagaaattgcgttaaaagaaaagttgaataatctgaatgacaaagattacattgaaaaaattgcgcgtgatgattattacttaagcaacaaaggtgaagtgatttttaggttgccagaagacaaagattcgtctagctcaaaatcttcgaaaaaataa

SEQ ID NO: 213 - DNA, 1296 bp, Staphylococcus aureus
atgcagttaaatagtaatggttggcatgttgatgaccatattgttgtcgctgtttctacaggtattgatagtatgtgtttattgtatcaactactaaatgattataaagatagttatagaaaactaacatgcttacatgtcaatcatggcgttaggtcagcttcaattgaggaagccagatttttagaagcatactgcgaacgtcatcacattgatttacatatcaaaaagttagatttgtcgcatagtctcgaccgaaataacagcattcagaatgaagctcgaattaaacgttacgaatggtttgatgaaatgatgaatgtattagaagcggatgtattgctaacggcgcatcatttggacgatcaattagaaactattatgtatcgtatttttaatgggaaatcaacgcgtaataaactaggatttgatgagttatcgaagcgaaaaggttatcagatttatcgaccacttttagctgtctctaaaaaagaaataaaacaattccaagagagatatcatattccatattttgaagatgaatctaataaagataacaaatatattagaaatgatattcgtaatagaattattccagctattgatgaaaataatcaacttaaagtatcgcatttattaaaattaaaacaatggcatgatgaacaatatgatattttgcaatattcagctaaacaatttattcaagaatttgtgaagtttgatgaacagtcaaaatatttagaggtttctagacaagcttttaataacttaccaaactcattaaagatggttgtgttggactgcctattatcaaagtattatgagttgtttaatattagtgctaaaacatacgaagagtggtttaaacaatttagtagtaagaaagcacaattcagtattaatctcacggataaatggataattcaaatcgcatatggtaaattaataataatggctaaaaataatggcgatacatattttagagttcaaacaattaaaaagccaggtaattatttttttaacaaatatcgattagagatacattctaatttaccaaaatgtttatttccgcttacagtgagaacacgacaaagtggcgatacatttaaactgaatgggcgcgatggttataagaaagtgaatcgcctgtttatagattgtaaagtgccacagtgggttcgggatcaaatgccaatcgtattggataaacaacagcgcattattgcggtaggagatttatatcaacaacaaacaataaaaaaatggattataattagtaaaaatggagatgaatag

SEQ ID NO: 214 - DNA, 540 bp, Staphylococcus aureus
atgcataatgatttgaaagaagtattgttaactgaagaagatattcaaaatatctgtaaggaattgggagcacaattaacaaaggattatcaaggtaaaccattagtatgcgtgggtatcttaaaaggctcagcaatgtttatgtcagatttaattaaacgaattgatacccatttatcaattgatttcatggatgtttctagttatcacggaggcactgagtcaactggtgaagttcaaatcattaaagatttaggttcttctattgaaaataaagacgtattaattattgaagatatcttagagactggtactacacttaagtcaattactgaattattacaatctagaaaagttaattcattagaaatagttactttattagataaaccaaaccgtcgtaaagcggacattgaagctaagtatgtaggtaaaaaaataccagatgaatttgttgttggttacggtttagattatcgtgaattataccgaaacttaccatatatcggtacgttaaaacctgaagtgtattcaaattaa

SEQ ID NO: 215 - DNA, 804 bp, Staphylococcus aureus
atgactaaaacaaaaattatgggcatattaaacgtcacacctgattcattctcagatggtggaaaatttaataatgttgaaacagctataaatagagtgaaagccatgatagatgaaggtgctgacattatagatgttggaggtgtttcaacgagacccggtcatgaaatggttacattagaagaagagctgaacagagtattacctgttgttgaagctattgtcggttttgatgtaaaaatttcagtcgatacatttcgaagtgaggttgctgaagcatgtttaaaattaggcgttgatatgattaatgatcaatgggcgggtctgtatgatcatcgtatgttccaaattgtagctaaatatgacgcggaaattattttaatgcataatggaaatggtaatcgtgatgaaccggttgtcgaagaaatgttaacatctttgttagcacaagcacatcaagctaaaatagctggtataccttcaaataaaatttggctagatccaggtataggtttcgctaaaactagaaatgaagaagccgaagttatggcaagactggatgaacttgttgcaacagaatatccagttttattagcgacaagccggaaacgtttcactaaagagatgatgggttatgatacaacaccggttgaaagagatgaagtaactgcagctacgactgcatatggtattatgaaaggcgttagagcagtacgcgttcataatgtcgagttgaatgctaaattagctaaaggtatagattttttaaaggagaatgaaaatgcaagacacaatctttcttaa

SEQ ID NO: 216 - DNA, 366 bp, Staphylococcus aureus
atgcaagacacaatctttcttaaaggtatgcgcttttatggatatcatggtgctttatcagctgaaaatgaaatagggcaaattttcaaagtggatgtaactttgaaagtagacttagctgaagctgggcgtactgataatgttattgatacagttcattatggtgaagtgttcgaagaggttaaatcaattatggaaggtaaggccgttaatttacttgagcatctagctgaacgtattgcaaatcgtataaattcacaatataatcgtgtaatggaaacaaaagtgagaatcactaaagaaaacccaccgattccgggtcattatgatggagtaggtatcgaaatagtgagggagaataaatga

SEQ ID NO: 217 - DNA, 477 bp, Staphylococcus aureus
atgattcaagcatacttaggattaggtagtaatattggtgatagagaaagccagttaaacgatgctataaagattttgaatgaatatgatggtattagcgtatctaatatttctccgatttatgaaacagcaccagttgggtatactgagcaacctaactttttaaatttgtgtgttgaaattcaaacaacactcacagtattacaactgttggaatgttgtttgaagacagaagaatgtttacaccgtattagaaaggaacgatggggtcctagaactttagatgtggatattttgttgtatggagaagaaatgatagatttaccaaaactgtcggtgccacatccgagaatgaatgaacgtgcatttgttttaatcccattaaatgatatagcagcaaatgtcgtagaaccacgttcgaaattgaaagtgaaagatttagtttttgtcgatgacagtgtaaagagatataaataa

SEQ ID NO: 218 - DNA, 115 bp, Staphylococcus aureus
tctggtggctatagcaaggaggtcacacctgttcccatgccgaacacagaagttaagctccttagcgtcgatggtagtcgaacttacgttccgctagagtagaacgttgccaggc

SEQ ID NO: 219 - DNA, 73 bp, Staphylococcus aureus
ggagaattagctcagctgggagagcatctgccttacaagcagagggtcggcggttcgaacccgtcattctcca

SEQ ID NO: 220 - DNA, 73 bp, Staphylococcus aureus
gccggcctagctcaattggtagagcaactgacttgtaatcagtaggttgggggttcaagtcctctggccggca

SEQ ID NO: 221 - DNA, 73 bp, Staphylococcus aureus
gagccattagctcagctggtagagcatctgacttttaatcagagggtcagaggttcgaatcctctatggctca

SEQ ID NO: 222 - DNA, 72 bp, Staphylococcus aureus
gcagaagtagttcagcggtagaatacaaccttgccaaggttggggtcgcgggttcgaatcccgtcttctgct

SEQ ID NO: 223 - DNA, 86 bp, Staphylococcus aureus
gccggggtggcggaactggcagacgcacaggacttaaaatcctgcggtgagagatcaccgtaccggttcgattccggtcctcggca

SEQ ID NO: 224 - DNA, 74 bp, Staphylococcus aureus
gcgcccgtagctcaattggatagagcgtttgactacggatcaagaggttatgggttcgactcctatcgggcgcg

SEQ ID NO: 225 - DNA, 74 bp, Staphylococcus aureus
cgggaagtagctcagcttggtagagcacttggtttgggaccaaggggtcgcaggttcgaatcctgtcttcccga

SEQ ID NO: 226 - DNA, 73 bp, Staphylococcus aureus
gggggcttagctcagctgggagagcgcctgctttgcacgcaggaggtcagcggttcgatcccgctagtctcca

SEQ ID NO: 227 - DNA, 1555 bp, Staphylococcus aureus
ttttatggagagtttgatcctggctcaggatgaacgctggcggcgtgcctaatacatgcaagtcgagcgaacggatgagaagcttgcttctctgatgttagcggcggacgggtgagtaacacgtggataacctacctataagactgggataacttcgggaaaccggagctaataccggataatattttgaaccgcatggttcaaaagtgaaagacggtcttgctgtcacttatagatggatccgcgctgcattagctagttggtaaggtaacggcttaccaaggcaacgatgcatagccgacctgagagggtgatcggccacactggaactgagacacggtccagactcctacgggaggcagcagtagggaatcttccgcaatgggcgaaagcctgacggagcaacgccgcgtgagtgatgaaggtcttcggatcgtaaaactctgttattagggaagaacatatgtgtaagtaactgtgcacatcttgacggtacctaatcagaaagccacggctaactacgtgccagcagccgcggtaatacgtaggtggcaagcgttatccggaattattgggcgtaaagcgcgcgtaggcggttttttaagtctgatgtgaaagcccacggctcaaccgtggagggtcattggaaactggaaaacttgagtgcagaagaggaaagtggaattccatgtgtagcggtgaaatgcgcagagatatggaggaacaccagtggcgaaggcgactttctggtctgtaactgacgctgatgtgcgaaagcgtggggatcaaacaggattagataccctggtagtccacgccgtaaacgatgagtgctaagtgttagggggtttccgccccttagtgctgcagctaacgcattaagcactccgcctggggagtacgaccgcaaggttgaaactcaaaggaattgacggggacccgcacaagcggtggagcatgtggtttaattcgaagcaacgcgaagaaccttaccaaatcttgacatcctttgacaactctagagatagagccttccccttcgggggacaaagtgacaggtggtgcatggttgtcgtcagctcgtgtcgtgagatgttgggttaagtcccgcaacgagcgcaacccttaagcttagttgccatcattaagttgggcactctaagttgactgccggtgacaaaccggaggaaggtggggatgacgtcaaatcatcatgccccttatgatttgggctacacacgtgctacaatggacaatacaaagggcagcgaaaccgcgaggtcaagcaaatcccataaagttgttctcagttcggattgtagtctgcaactcgactacatgaagctggaatcgctagtaatcgtagatcagcatgctacggtgaatacgttcccgggtcttgtacacaccgcccgtcacaccacgagagtttgtaacacccgaagccggtggagtaaccttttaggagctagccgtcgaaggtgggacaaatgattggggtgaagtcgtaacaaggtagccgtatcggaaggtgcggctggatcacctcctttct

SEQ ID NO: 228 - DNA, 74 bp, Staphylococcus aureus
gggcctatagctcagctggttagagcgcacgcctgataagcgtgaggtcggtggttcgagtccacttaggccca

SEQ ID NO: 229 - DNA, 2834 bp, Staphylococcus aureus
gattaagttattaagggcgcacggtggatgccttggcactagaagccgatgaaggacgttactaacgacgatatgctttggggagctgtaagtaagctttgatccagagatttccgaatggggaaacccagcatgagttatgtcatgttatcgatatgtgaatacatagcatatcagaaggcacacccggagaactgaaacatcttagtacccggaggaagagaaagaaaattcgattcccttagtagcggcgagcgaaacgggaagagcccaaaccaaaaagcttgcttgttggggttgtaggacgctctatacggagttacaaaggacgacattagacgaatcatctggaaagatgaatcaaagaaggtaataatcctgtagtcgaaaatgttgtctctcttgagtggatcctgagtacgacggagcacgtgaaattccgtcggaatctgggaggaccatctcctaaggctaaatactctctagtgaccgatagtgaaccagtaccgtgagggaaaggtgaaaagcaccccggaaggggagtgaaatagaacctgaaaccgtgtgcttacaagtagtcagagcccgttaatgggtgatggcgtgccttttgtagaatgaaccggcgagttacgatttgatgcaaggttaagcagtaaatgtggagccgtagcgaaagcgagtctgaatagggcgtttagtatttggtcgtagacccgaaaccaggtgatctacccttggtcaggttgaagttcaggtaacactgaatggaggaccgaaccgacttacgttgaaaagtgagcggatgaactgagggtagcggagaaattccaatcgaacctggagatagctggttctctccgaaatagctttagggctagcctcaagtgatgattattggaggtagagcactgtttggacgaggggcccctctcgggttaccgaattcagacaaactccgaatgccaattaatttaacttgggagtcagaacatgggtgataaggtccgtgttcgaaagggaaacagcccagaccaccagctaaggtcccaaaatatatgttaagtggaaaaggatgtggcgttgcccagacaactaggatgttggcttagaagcagccatcatttaaagagtgcgtaatagctcactagtcgagtgacactgcgccgaaaatgtaccggggctaaacatattaccgaagctgtggattgtcctttggacaatggtaggagagcgttctaagggcgttgaagcatgatcgtaaggacatgtggagcgcttagaagtgagaatgccggtgtgagtagcgaaagacgggtgagaatcccgtccaccgattgactaaggtttccagaggaaggctcgtccgctctgggttagtcgggtcctaagctgaggccgacaggcgtaggcgatggataacaggttgatattcctgtaccacctataatcgttttaatcgatggggggacgcagtaggataggcgaagcgtgcgattggattgcacgtctaagcagtaaggctgagtattaggcaaatccggtactcgttaaggctgagctgtgatggggagaagacattgagtcttcgagtcgttgatttcacactgccgagaaaagcctctagatagaaaataggtgcccgtaccgcaaaccgacacaggtagtcaagatgagaattctaaggtgagcgagcgaactctcgttaaggaactcggcaaaatgaccccgtaacttcgggagaaggggtgctctttagggttaacgcccagaagagccgcagtgaataggcccaagcgactgtttatcaaaaacacaggtctctgctaaaccgtaaggtgatgtataggggctgacgcctgcccggtgctggaaggttaagaggagtggttagcttctgcgaagctacgaatcgaagccccagtaaacggcggccgtaactataacggtcctaaggtagcgaaattccttgtcgggtaagttccgacccgcacgaaaggcgtaacgatttgggcactgtctcaacgagagactcggtgaaatcatagtacctgtgaagatgcaggttacccgcgacaggacggaaagaccccgtggagctttactgtagcctgatattgaaattcggcacagcttgtacaggataggtaggagcctttgaaacgtgagcgctagcttacgtggaggcgctggtgggatactaccctagctgtgttggctttctaacccgcaccacttatcgtggtgggagacagtgtcaggcgggcagtttgactggggcggtcgcctcctaaaaggtaacggaggcgctcaaaggttccctcagaatggttggaaatcattcatagagtgtaaaggcataagggagcttgactgcgagacctacaagtcgagcagggtcgaaagacggacttagtgatccggtggttccgcatggaagggccatcgctcaacggataaaagctaccccggggataacaggcttatctcccccaagagttcacatcgacggggaggtttggcacctcgatgtcggctcatcgcatcctggggctgtagtcggtcccaagggttgggctgttcgcccattaaagcggtacgcgagctgggttcagaacgtcgtgagacagttcggtccctatccgtcgtgggcgtaggaaatttgagaggagctgtccttagtacgagaggaccgggatggacatacctctggtgtaccagttgtcgtgccaacggcatagctgggtagctatgtgtggacgggataagtgctgaaagcatctaagcatgaagcccccctcaagatgagatttcccaacttcggttataagatc

SEQ ID NO: 230 - DNA, 115 bp, Staphylococcus aureus
tctggtgactatagcaaggaggtcacacctgttcccatgccgaacacagaagttaagctccttagcgtcgatggtagtcgaacttacgttccgctagagtagaacgttgccaggc

SEQ ID NO: 231 - DNA, 1827 bp, Staphylococcus aureus
ttgaaaagactaggaatggagagattcaagatgattacattatataatacgcttacacgtcaaaaagaagtgttcaagcctatagaaccagggaaagtaaaaatgtatgtatgtggtcctactgtatataactacattcatattggtaacgcaagaccagcaattaattatgacgtagtgagacgttactttgaataccaaggatataatgtagaatatgtatcaaattttacagacgtagatgataaattaattaaacgttctcaagaattaaatcagtctgttcccgaaattgcagaaaaatatatcgctgcttttcatgaagatgttggtgcgttaaatgttagaaaagcgacttcaaatccaagggtaatggaccatatggatgacattattcaatttattaaagatttggtggatcaaggttatgcatatgaaagtggtggcgatgtttactttagaacacgtaaatttgaaggttatggtaaattaagtcatcaatccatagatgacttaaaagtgggtgctcgtatagatgcaggagagcataaagaagatgcacttgattttacattgtggaaaaaagcgaagcctggcgagattagttggaatagcccatttggtgaaggtagaccaggatggcatatagaatgttctgtaatggcatttcatgagctaggacctacaattgatatacatgcgggtggttcagatttacaatttccacatcatgaaaatgaaatagcacaatcagaagcacataatcatgcgccatttgctaattattggatgcataatggtttcattaatattgataatgaaaaaatgagtaaatcactaggcaactttattttagttcacgatattattaaagaagttgatccagatgtactaagattctttatgattagcgtacattatagaagcccaattaactataatctagaattggtagaatcagcacgtagtggactagagcgtattcgcaatagttatcaattaattgaagagcgcgcacaaattgctactaatattgaaaatcaacagacatatattgatcaaattgatgcgattttaaatcgttttgaaacagttatgaatgatgattttaatacagctaatgcaattacagcttggtatgatttagcaaaacttgcgaataaatatgtactagagaacacaacatcaacagaagtaattgataaatttaaagcagtttatcaaattttcagcgatgttttaggtgtaccgttaaaatctaaaaatgcagatgaattattggatgaagatgttgaaaaattaatcgaagagcgtaatgaagcaaggaaaaacaaagattttgcacgagcagatgagattcgagacatgctgaaatcacaaaacattatattagaagacacacctcaaggggttagatttaaacgtggatatcaacaagataatcacattaaattattgaatccattgaccttagcatatatgggagacgcagtcttagatcaatatgtacgtacctatatcgttttaaagcttaaaagtaagcctaataaactacatcaaatgtctaaaaaatatgtatctgccaaaagtcaggcgcaaacgttagaatatttaatggagcaagaatggtttacagacgaagaaatggatattttgaagcgagggcgtaacgcgaaaagtcatactaaagctaaaaacactgatgttcaaacatatcgtaaaagttcagcgatagaagcagtgataggttttctttatttagaaaaaagagaagaacgattagaggcattattaaataaaataataacaatagtaaacgaaaggtag

SEQ ID NO: 232 - DNA, 423 bp, Staphylococcus aureus
gtggctaaaaaagtagataaagttgttaaattacaaattcctgcaggtaaagcgaatccagcaccaccagttggtccagcattaggtcaagcaggtgtgaacatcatgggattctgtaaagagttcaatgcacgtactcaagatcaagcaggtttaattattccggtagaaatcagtgtttatgaagatcgttcatttacatttattacaaaaactccaccggctccagtattacttaaaaaagcagctggtattgaaaaaggttcaggcgaaccaaacaaaactaaagttgctacagtaactaaagatcaagtacgcgaaattgctaacagcaaaatgcaagacttaaacgctgctgacgaagaagcagctatgcgtattatcgaaggtactgcacgtagtatgggtatcgttgtagaataa

SEQ ID NO: 233 - DNA, 501 bp, Staphylococcus aureus
atgtctgctatcattgaagctaaaaaacaactagttgatgaaattgctgaggtactatcaaattcagtttcaacagtaatcgttgactatcgtggattaacagtagctgaagttactgacttacgttcacaattacgtgaagctggtgttgagtataaagtatacaaaaacactatggtacgtcgtgcagctgaaaaagctggtatcgaaggcttagatgaattcttaacaggtcctactgctattgcaacttcaagtgaagatgctgtagctgcagcgaaagtaatttctggatttgctaaagatcatgaagcattagaaattaaatcaggtgttatggaaggcaatgttattacagcagaagaagttaaaactgttggttcattaccttcacacgatggtcttgtatctatgcttttatcagtattacaagctcctgtacgcaacttcgcttatgcggttaaagctattggagaacaaaaagaagaaaacgctgaataa

SEQ ID NO: 234 - DNA, 369 bp, Staphylococcus aureus
atggctaatcatgaacaaatcattgaagcgattaaagaaatgtcagtattagaattaaacgacttagtaaaagcaattgaagaagaatttggtgtaactgcagctgctccagtagcagtagcaggtgcagctggtggcgctgacgctgcagcagaaaaaactgaatttgacgttgagttaacttcagctggttcatctaaaatcaaagttgttaaagctgttaaagaagcaactggtttaggattaaaagatgctaaagaattagtagacggagctcctaaagtaatcaaagaagctttacctaaagaagaagctgaaaaacttaaagaacaattagaagaagttggagctactgtagaattaaaataa

SEQ ID NO: 235 - DNA, 3552 bp, Staphylococcus aureus
ttggcaggtcaagttgtccaatatggaagacatcgtaaacgtagaaactacgcgagaatttcagaagtattagaattaccaaacttaatagaaattcaaactaaatcttacgagtggttcctaagagaaggtttaatcgaaatgtttagagacatttctccaattgaagattttactggtaatttgtcattagagtttgtggattaccgtttaggagaaccaaaatatgatttagaagaatctaaaaaccgtgacgctacttatgctgcacctcttcgtgtaaaagtgcgtctaatcattaaagaaacaggagaagttaaagaacaagaagtctttatgggtgatttcccattaatgactgatacaggtacgttcgttatcaatggtgcagaacgtgtaatcgtatctcaattagttcgttcaccatccgtttatttcaatgaaaaaatcgacaaaaatggtcgtgaaaactatgatgcaacaattattccaaaccgtggtgcatggttagaatatgaaacagatgctaaagatgttgtatacgtacgtattgatagaacacgtaaactaccattaacagtattgttacgtgcattaggtttctcaagtgaccaagaaattgttgaccttttaggtgacaatgaatatttacgtaatactttagagaaagacggcactgaaaacactgaacaagcgttattagaaatctatgaacgtttacgtccaggtgaaccaccaactgttgaaaatgctaaaagtctattgtattcacgtttctttgatccaaaacgctatgacttagcaagcgtgggtcgttataaaacaaacaaaaaattacatttaaaacatcgtttatttaatcaaaaattagctgagccaattgtaaatactgaaactggtgaaattgtagttgaagaaggtacagtgcttgatcgtcgtaaaatcgacgaaatcatggatgtacttgaatcaaatgcaaacagcgaagtgtttgaattgcatggtagcgttatagacgagccagtagaaattcaatcaattaaagtatatgttcctaacgatgatgaaggtcgtacgacaactgtaattggtaatgctttccctgactcagaagttaaatgcattacaccagcagatatcattgcttcaatgagttacttctttaacttattaagcggtattggatatacagatgatattgaccatttaggtaaccgtcgtttacgttctgtaggtgaattactacaaaaccaattccgtatcggtttatcaagaatggaaagagttgtacgtgaaagaatgtcaattcaagatactgagtctatcacacctcaacaattaattaatattcgacctgttattgcatctattaaagaattctttggtagctctcaattatcacaattcatggaccaagcaaacccattagctgagttaacgtataaacgtcgtctatcagcattaggacctggtggtttaacacgtgaacgtgctcaaatggaagtacgtgacgttcactactctcactatggccgtatgtgtccaattgaaacacctgagggaccaaacattggattgattaactcattatcaagttatgcacgtgtaaatgaattcggctttattgaaacaccatatcgtaaagttgatttagatacacatgctatcactgatcaaattgactatttaacagctgacgaagaagatagctatgttgtagcacaagcaaactctaaattagatgaaaatggtcgtttcatggatgatgaagttgtatgtcgtttccgtggtaacaatacagttatggctaaagaaaaaatggattatatggatgtatcgccgaagcaagttgtttcagcagcgacagcatgtattccattcttagaaaacgatgactcaaaccgtgcattgatgggtgcgaacatgcaacgtcaagcagtgcctttgatgaatccagaagcaccatttgttggaacaggtatggaacacgttgcagcacgtgattctggtgcagctattacagctaagcacagaggtcgtgttgaacatgttgaatctaatgaaattcttgtacgtcgtctagttgaagagaacggcgttgagcatgaaggtgaattagatcgctatccattagctaaatttaaacgttcaaactcaggtacatgttacaaccaacgtccaatcgttgcagttggagatgttgttgagtataacgagattttagcagatggaccatctatggaattaggagaaatggcattaggtagaaacgtagtagttggtttcatgacttgggacggttacaactatgaggatgccgttatcatgagtgaaagacttgtgaaagatgacgtgtatacttctattcatattgaagagtatgaatcagaagcacgtgatactaagttaggacctgaagaaatcacaagagatattcctaatgtttctgaaagtgcacttaagaacttagacgatcgtggtatcgtttatattggtgcagaagtaaaagatggagatattttagttggtaaagtaacgcctaaaggtgtaactgagttaactgccgaagaaagattgttacatgcaatctttggtgaaaaagcacgtgaagttagagatacttcattacgtgtacctcacggcgctggcggtatcgttcttgatgtaaaagtattcaatcgtgaagaaggcgacgatacattatcacctggtgtaaaccaattagtacgtgtatatatcgttcaaaaacgtaaaattcatgttggtgataagatgtgtggtcgacatggtaacaaaggtgtcatttctaagattgttcctgaagaagatatgccttacttaccagatggacgtccgatcgatatcatgttaaatcctcttggtgtaccatctcgtatgaacatcggacaagtattagagctacacttaggtatggctgctaaaaatcttggtattcacgttgcatcaccagtatttgacggtgcaaacgatgacgatgtatggtcaacaattgaagaagctggtatggctcgtgatggtaaaactgtactttatgatggacgtacaggtgaaccattcgataaccgtatttcagtaggtgtaatgtacatgttgaaacttgcgcacatggttgatgataaattacatgcgcgttcaacaggaccatattcacttgttacacaacaaccacttggcggtaaagcgcaattcggtggacaacgtttcggtgagatggaggtatgggcacttgaagcatatggtgctgcatacacattacaagaaatcttaacttacaaatccgatgatacagtaggacgtgtgaaaacatacgaggctattgttaaaggtgaaaacatctctagaccaagtgttccagaatcattccgagtattgatgaaagaattacaaagtttaggtttagatgtaaaagttatggatgagcaagataatgaaatcgaaatgacagacgttgatgacgatgatgttgtagaacgcaaagtagatttacaacaaaatgatgctcctgaaacacaaaaagaagttactgattaa

SEQ ID NO: 236 - DNA, 3624 bp, Staphylococcus aureus
ttgattgatgtaaataatttccattatatgaaaataggattggcttcacctgaaaaaatccgttcttggtcttttggtgaagttaaaaaacctgaaacaatcaactaccgtacattaaaacctgaaaaagatggtctattctgtgaaagaattttcggacctacaaaagactgggaatgtagttgtggtaaatacaaacgtgttcgctacaaaggcatggtctgtgacagatgtggagttgaagtaactaaatctaaagtacgtcgtgaaagaatgggtcacattgaacttgctgctccagtttctcacatttggtatttcaaaggtataccaagtcgtatgggattattacttgacatgtcaccaagagcattagaagaggttatttactttgcttcttatgttgttgtagatccaggtccaactggtttagaaaagaaaactttattatctgaagctgaattcagagattattatgataaatacccaggtcaattcgttgcaaaaatgggtgcagaaggtattaaagatttacttgaagagattgatcttgacgaagaacttaaattgttacgcgatgagttggaatcagctactggtcaaagacttactcgtgcaattaaacgtttagaagttgttgaatcattccgtaattcaggtaacaaaccttcatggatgattttagatgtacttccaatcatcccaccagaaattcgtccaatggttcaattagatggtggacgatttgcaacaagtgacttaaacgacttataccgtcgtgtaattaatcgaaataatcgtttgaaacgtttattagatttaggtgcacctggtatcatcgttcaaaacgaaaaacgtatgttacaagaagccgttgacgctttaattgataatggtcgtcgtggtcgtccagttactggcccaggtaaccgtccattaaaatctttatctcatatgttaaaaggtaaacaaggtcgtttccgtcaaaacttacttggtaaacgtgtcgactattcaggacgttcagttattgcagtaggtccaagcttgaaaatgtaccaatgtggtttaccaaaagaaatggcacttgaactatttaaaccattcgtaatgaaagaattagttcaacgtgaaattgcaactaacattaaaaatgcgaagagtaaaatcgaacgtatggatgatgaagtttgggacgtattggaagaagtaattagagaacatcctgtattacttaaccgtgcaccaacacttcatagacttggtattcaagcatttgaaccaactttagttgaaggtcgtgcgattcgtctacatccacttgtaacaacagcttataatgctgactttgacggtgaccaaatggcggttcacgttcctttatcaaaagaggcacaagctgaagcaagaatgttgatgttagcagcacaaaacatcttgaaccctaaagatggtaaacctgtagttacaccatcacaagatatggtacttggtaactattaccttactttagaaagaaaagatgcagtaaatacaggcgcaatctttaataatacaaatgaagtattaaaagcatatgcaaatggctttgtacatttacacactagaattggtgtacatgcaagttcgttcaataatccaacatttactgaagaacaaaacaaaaagattcttgctacgtcagtaggtaaaattatattcaatgaaatcattccagattcatttgcttatattaatgaacctacgcaagaaaacttagaaagaaagacaccaaacagatatttcatcgatcctacaactttaggtgaaggtggattaaaagaatactttgaaaatgaagaattaattgaacctttcaacaaaaaattcttaggtaatattattgcagaagtattcaacagatttagcatcactgatacatcaatgatgttagaccgtatgaaagacttaggattcaaattctcatctaaagctggtattacagtaggtgttgctgatatcgtagtattacctgataagcaacaaatacttgatgagcatgaaaaattagtcgacagaattacaaaacaattcaaccgtggtttaatcactgaagaagaaagatataatgcagttgttgaaatttggacagatgcaaaagatcaaattcaaggtgaattgatgcaatcacttgataaaactaacccaatcttcatgatgagtgattcaggtgcccgtggtaacgcatctaactttacacagttagcaggtatgcgtggattgatggccgcaccatctggtaagattatcgaattaccaatcacatcttcattccgtgaaggtttaacagtacttgaatacttcatctcaactcacggtgcacgtaaaggtcttgccgatacagcacttaaaacagctgactcaggatatcttactcgtcgtcttgttgacgtggcacaagatgttattgttcgtgaagaagactgtggtactgatagaggtttattagtttctgatattaaagaaggtacagaaatgattgaaccatttatcgaacgtattgaaggtcgttattctaaagaaacaattcgtcatcctgaaactgatgaaataatcattcgtcctgatgaattaattacacctgaaattgctaagaaaattacagatgctggtattgaacaaatgtatattcgctcagcatttacttgtaacgcacgacatggtgtttgtgaaaaatgttacggtaaaaaccttgctactggtgaaaaagttgaagttggtgaagcagttggtacaattgcagcccaatctatcggtgaaccaggtacacagcttacaatgcgtacattccatacaggtggggtagcaggtagcgatatcacacaaggtcttcctcgtattcaagagattttcgaagcacgtaaccctaaaggtcaagcggtaattacggaaatcgaaggtgtcgtagaagatattaaattagcaaaagatagacaacaagaaattgttgttaaaggtgctaatgaaacaagatcataccttgcttcaggtacttcaagaattattgtagaaatcggtcaaccagttcaacgtggtgaagtattaactgaaggttctattgaacctaagaattacttatctgttgctggattaaacgcgactgaaagctacttattaaaagaagtacaaaaagtttaccgtatgcaaggtgtagaaatcgacgataaacacgttgaggttatggttcgacaaatgttacgtaaagttagaattatcgaagcaggtgatacgaagttattaccaggttcattagttgatattcataacttcacagatgcaaatagagaagcatttaaacaccgtaagcgtcctgcaacagctaaaccagtattacttggtattactaaagcatcacttgaaacagaaagtttcttatctgcagcatcattccaagaaacaacaagagttcttacagatgcagcaattaaaggtaagcgtgatgacttattaggtcttaaagaaaacgtaattattggtaagttaattccagctggtactggtatgagacgttatagcgacgtaaaatacgaaaaaacagctaaaccagttgcagaagttgaatctcaaactgaagtaacggaataa

SEQ ID NO: 237 - DNA, 414 bp, Staphylococcus aureus
atgccaactattaaccaattagtacgtaaaccaagacaaagcaaaatcaaaaaatcagattctccagctttaaataaaggtttcaacagtaaaaagaaaaaatttactgacttaaactcaccacaaaaacgtggtgtatgtactcgtgtaggtacaatgacacctaaaaaacctaactcagcgttacgtaaatatgcacgtgtgcgtttatcaaacaacatcgaaattaacgcatacatccctggtatcggacataacttacaagaacacagtgttgtacttgtacgtggtggacgtgtaaaagacttaccaggtgtgcgttaccatattgtacgtggagcacttgatacttcaggtgttgacggacgtagacaaggtcgttcattatacggaactaagaaacctaaaaactaa

SEQ ID NO: 238 - DNA, 471 bp, Staphylococcus aureus
atgcctcgtaaaggatcagtacctaaaagagacgtattaccagatccaattcataactctaagttagtaactaaattaattaacaaaattatgttagatggtaaacgtggaacagcacaaagaattctttattcagcattcgacctagttgaacaacgcagtggtcgtgatgcattagaagtattcgaagaagcaatcaacaacattatgccagtattagaagttaaagctcgtcgtgtaggtggttctaactatcaagtaccagtagaagttcgtccagagcgtcgtactactttaggtttacgttggttagttaactatgcacgtcttcgtggtgaaaaaacgatggaagatcgtttagctaacgaaattttagatgcagcaaataatacaggtggtgccgttaagaaacgtgaggacactcacaaaatggctgaagcaaacaaagcatttgctcactaccgttggtaa

SEQ ID NO: 239 - DNA, 2082 bp, Staphylococcus aureus
atggctagagaattttcattagaaaaaactcgtaatatcggtatcatggctcacattgatgctggtaaaacgactacgactgaacgtattctttattacactggccgtatccacaaaattggtgaaacacacgaaggtgcttcacaaatggactggatggagcaagaacaagaccgtggtattactatcacatctgctgcaacaacagcagcttgggaaggtcaccgtgtaaacattatcgatacacctggacacgtagacttcactgtagaagttgaacgttcattacgtgtacttgacggagcagttacagtacttgatgcacaatcaggtgttgaaccacaaactgaaacagtttggcgtcaggctacaacttatggtgttccacgtatcgtatttgtaaacaaaatggacaaattaggtgctaacttcgaatactctgtaagtacattacatgatcgtttacaagctaacgctgctccaatccaattaccaattggtgcggaagacgaattcgaagcaatcattgacttagttgaaatgaaatgtttcaaatatacaaatgatttaggtactgaaattgaagaaattgaaattcctgaagaccacttagatagagctgaagaagctcgtgctagcttaatcgaagcagttgcagaaactagcgacgaattaatggaaaaatatcttggtgacgaagaaatttcagtttctgaattaaaagaagctatccgccaagctactactaacgtagaattctacccagtactttgtggtacagctttcaaaaacaaaggtgttcaattaatgcttgacgctgtaattgattacttaccttcaccactagacgttaaaccaattattggtcaccgtgctagcaaccctgaagaagaagtaatcgcgaaagcagacgattcagctgaattcgctgcattagcgttcaaagttatgactgacccttatgttggtaaattaacattcttccgtgtgtattcaggtacaatgacatctggttcatacgttaagaactctactaaaggtaaacgtgaacgtgtaggtcgtttattacaaatgcacgctaactcacgtcaagaaatcgatactgtatactctggagatatcgcggctgcggtaggtcttaaagatacaggtactggtgatactttatgtggtgagaaaaatgacattatcttggaatcaatggaattcccagagccagttattcacttatcagtagagccaaaatctaaagctgaccaagataaaatgactcaagctttagttaaattacaagaagaagacccaacattccatgcacacactgacgaagaaactggacaagttatcatcggtggtatgggtgagcttcacttagacatcttagtagaccgtatgaagaaagaattcaacgttgaatgtaacgtaggtgctccaatggtttcatatcgtgaaacattcaaatcatctgcacaagttcaaggtaaattctctcgtcaatctggtggtcgtggtcaatacggtgatgttcacattgaattcacaccaaacgaaacaggcgcaggtttcgaattcgaaaacgctatcgttggtggtgtagttcctcgtgaatacattccatcagtagaagctggtcttaaagatgctatggaaaatggtgtcttagcaggttatcctttaattgatgttaaagctaaattatatgatggttcataccatgatgtcgattcatctgaaatggccttcaaaattgctgcatcattagcacttaaagaagctgctaaaaaatgtgatcctgtaatcttagaaccaatgatgaaagtaactattgaaatgcctgaagagtacatgggtgatatcatgggtgacgtaacatctcgtcgtggacgtgttgatggtatggaacctcgtggtaatgcacaagttgttaatgcttatgtaccactttcagaaatgttcggttatgcaacatcattacgttcaaacactcaaggtcgcggtacttacactatgtacttcgatcactatgctgaagttccaaaatcaatcgctgaagatattatcaagaaaaataaaggtgaataa

SEQ ID NO: 240 - DNA, 1185 bp, Staphylococcus aureus
atggcaaaagaaaaattcgatcgttctaaagaacatgccaatatcggtactatcggtcacgttgaccatggtaaaacaacattaacagcagcaatcgctactgtattagcaaaaaatggtgactcagttgcacaatcatatgacatgattgacaacgctccagaagaaaaagaacgtggtatcacaatcaatacttctcacattgagtaccaaactgacaaacgtcactacgctcacgttgactgcccaggacacgctgactacgttaaaaacatgatcactggtgctgctcaaatggacggcggtatcttagtagtatctgctgctgacggtccaatgccacaaactcgtgaacacattcttttatcacgtaacgttggtgtaccagcattagtagtattcttaaacaaagttgacatggttgacgatgaagaattattagaattagtagaaatggaagttcgtgacttattaagcgaatatgacttcccaggtgacgatgtacctgtaatcgctggttcagcattaaaagctttagaaggcgatgctcaatacgaagaaaaaatcttagaattaatggaagctgtagatacttacattccaactccagaacgtgattctgacaaaccattcatgatgccagttgaggacgtattctcaatcactggtcgtggtactgttgctacaggccgtgttgaacgtggtcaaatcaaagttggtgaagaagttgaaatcatcggtttacatgacacatctaaaacaactgttacaggtgttgaaatgttccgtaaattattagactacgctgaagctggtgacaacattggtgcattattacgtggtgttgctcgtgaagacgtacaacgtggtcaagtattagctgctcctggttcaattacaccacatactgaatttaaagcagaagtatacgtattatcaaaagacgaaggtggacgtcacactccattcttctcaaactatcgtccacaattctatttccgtactactgacgtaactggtgttgttcacttaccagaaggtactgaaatggtaatgcctggtgataacgttgaaatgacagtagaattaatcgctccaatcgcgattgaagacggtactcgtttctcaatccgcgaaggtggacgtactgtaggatcaggcgttgttactgaaatcattaaataa

SEQ ID NO: 241 - DNA, 987 bp, Staphylococcus aureus
atggctgatttattaaatgtattaaaagacaaactttctggtaaaaacgttaaaatcgtattacctgaaggagaggacgaacgtgttctaacagctgcaacacaattacaagcaacagattatgttacaccaatcgtgttaggtgatgagactaaggttcaatctttagcgcaaaaacttgatcttgatatttctaatattgaattaattaatcctgcgacaagtgaattgaaagctgaattagttcaatcatttgttgaacgacgtaaaggtaaagcgactgaagaacaagcacaagaattattaaacaatgtgaactacttcggtacaatgcttgtttatgctggtaaagcagatggtttagttagtggtgcagcacattcaacaggagacactgtgcgtccagctttacaaatcatcaaaacgaaaccaggtgtatcaagaacatcaggtatcttctttatgattaaaggtgatgaacaatacatctttggtgattgtgcaatcaatccagaacttgattcacaaggacttgcagaaattgcagtagaaagtgcaaaatcagcattaagctttggcatggatccaaaagttgcaatgttaagcttttcaacaaaagggtctgctaaatcagacgacgtgacaaaagttcaagaagctgtcaaattagcacaacaaaaagctgaagaagaaaaattagaagcaatcattgatggcgaattccaatttgatgctgcgattgtaccaggtgttgctgagaaaaaagcgccaggtgctaaattacaaggtgatgcaaatgtctttgtattcccaagtttagaagctggtaatattggttacaaaattgcacaacgtttaggtggatatgatgcagttggtccagtattacaaggtttaaattctccagtaaatgacttatcacgtggctgctcaattgaagatgtatacaatctttcaattattacagcagcgcaagccttacaataa

SEQ ID NO: 242 - DNA, 840 bp, Staphylococcus aureus
attgcagtaccgtttaacgcaggtaaaatcaaagttttaatagaagccttagagagcgggaactattcgtctattaaaagcgatgtttacgatggtatgttatatgatgcgcctgaccatcttaagtctttggtgaaccgttttgtagaattaaataatattacagagccgctagcagtaacgatccaaacgaatttaccaccatcacgtggattaggatcgagtgcagctgtcgcggttgcttttgttcgtgcaagttatgattttttagggaaatcattaacgaaagaagaactcattgaaaaggctaattgggcagagcaaattgcacatggtaaaccaagtggtattgatacgcaaacgattgtatcaggcaaaccagtttggttccaaaaaggtcatgctgaaacattgaaaacgttaagtttagacggctatatggttgttattgatactggtgtgaaaggttcaacaagacaagcggtagaagatgttcataaactttgtgaggatcctcagtacatgtcacatgtaaaacatatcggtaagttagttttacgtgcgagtgatgtgattgaacatcataactttgaagccctagcggatatttttaatgaatgtcatgcggatttaaaggcgttgacagttagtcatgataaaatagaacaattaatgaaaattggtaaagaaaatggtgcgattgctggaaaacttactggtgctggtcgtggtggaagtatgttattgcttgccaaagatttaccaacagcgaaaaatattgtgaaagctgtagaaaaagctggtgcagcacatacatggattgagaatttaggaggttaa

SEQ ID NO: 243 - DNA, 984 bp, Staphylococcus aureus
ttgattaaaagtggcaaagcacgtgcacatacgaatattgcacttataaaatattggggtaaaaaagatgaagcactaatcattccaatgaataatagcatatctgttacattagaaaaattttacactgaaacgaaagtcacttttaacgaccagttaacacaggatcaattttggttgaatggtgaaaaggttagtggcaaagaattagagaaaatttcaaaatatatggatattgtcagaaatagagctggcatcgattggtatgctgaaattgaaagcgacaattttgtaccaacagcagcagggttggcttcatcagcaagcgcatatgcagctttagcagcagcttgtaatcaagcactagacttgcagctgtcagataaggatttatcgagattggcgcgaattggttcgggttctgcgtcgcgtagtatttatggtggatttgcagaatgggaaaaagggtataatgatgagacgtcatatgccgttccacttgaatcgaatcattttgaagatgaccttgccatgatatttgttgtgattaatcaacattctaaaaaggtacctagtcgatatggtatgtcgttgacacgaaacacatcaaggttttatcaatattggttagatcatattgatgaagatttagctgaagcaaaagcagcgattcaagacaaagattttaaacgccttggtgaagtaattgaagaaaatggtttacgtatgcatgccacgaatctgggatcaacaccgccgttcacttatcttgtgcaagaaagttatgatgtcatggcgctcgttcacgaatgccgagaagcgggatatccgtgttattttacgatggatgcgggtcctaatgtgaaaatacttgtagaaaagaaaaacaagcaacagattatagataaattattaacacagtttgataataaccaaattattgatagtgacattattgccacaggaattgaaataattgagtaa

SEQ ID NO: 244 - DNA, 1077 bp, Staphylococcus aureus
atgattcaggtcaaagcacccggaaaactttatattgctggagaatatgctgtaacagaaccaggatataaatctgtacttattgcgttagatcgttttgtaactgctactattgaagaagcagaccaatataaaggtaccattcattcaaaagcattacatcataacccagttacatttagtagagatgaagatagtattgtcatttcagatccacatgcagcaaaacaattaaattatgtggtcacagctattgaaatatttgaacaatacgcgaaaagttgcgatatagcgatgaagcattttcatctgactattgatagtaatttagatgattcaaatggtcataaatatggattaggttcaagtgcagcagtacttgtgtcagttataaaagtattaaatgaattttatgatatgaagttatctaatttatacatttataaactagcagtgattgcaaatatgaagttacaaagtttaagttcatgcggagatattgctgtgagtgtatatagtggatggttagcgtatagtacttttgatcatgaatgggttaagcatcaaattgaagatactacggttgaagaagttttaatcaaaaactggcctggattgcacatcgaaccattacaagcacctgaaaatatggaagtacttatcggttggactggctcaccggcgtcatcaccacactttgttagcgaagtgaaacgtttgaaatcagatccttcattttacggtgacttcttagaagattcacatcgttgtgttgaaaagcttattcatgcttttaaaacaaataacattaaaggtgtgcaaaagatggtgcgtcagaatcgtacaattattcaacgtatggataaagaagctacagttgatatagaaactgaaaagctaaaatatttgtgtgatattgctgaaaagtatcacggtgcatctaaaacatcaggcgctggtggtggagactgtggtattacaattatcaataaagatgtagataaagaaaaaatttatgatgaatggacaaaacatggtattaaaccattaaaatttaatatttatcatgggcaataa

SEQ ID NO: 245 - DNA, 1662 bp, Staphylococcus aureus
atgaatattattgatcaagtgaaacaaacattagtagaagaaattgcagcaagtattaacaaagcaggattagcagatgagattcctgatattaaaattgaagttcctaaagatacaaaaaatggagattatgctactaatattgcgatggtactgactaagattgcaaagcgtaatcctcgtgaaattgctcaagcgattgttgataacttagatactgaaaaagcacatgtaaaacaaattgacattgctggtccaggattcattaatttttacttagataatcagtatttaacagcaattattcctgaagcaattgaaaaaggtgatcaatttggacatgtaaatgaatcaaaaggtcaaaatgtattgcttgagtatgtttcagctaaccctacaggagatttacatattggtcatgctagaaatgcagcagttggtgatgctttagctaatattttaactgcagctggctataatgtaacacgtgaatattatattaatgatgctggtaatcaaattactaacttagcgcgttcgattgaaacacatttctttgaagctttaggtgacaatagttattcaatgccagaagatggctataatggaaaagatattattgaaataggtaaagatttagcagagaaacaccctgaaattaaagattattctgaagaagcacgtttgaaagaatttagaaaattaggcgtagaatacgaaatggctaaattgaaaaatgatttagcagagttcaatacgcattttgataattggtttagtgaaacatctttatatgaaaaaggcgaaattcttgaagttttagcaaaaatgaaagaattaggttatacgtatgaagctgatggcgctacatggttacgtacaactgattttaaagacgacaaagacagagtattaattaaaaatgacggtacatatacgtatttcttaccagatattgcgtaccacttcgataaagttaaacgtggtaatgacattttaatcgatttatttggtgctgatcatcatggttatattaatcgtttgaaagcatctcttgaaacgtttggtgtagatagtaatcgtttagaaattcaaatcatgcaaatggttcgtttaatggaaaatggtaaagaagtgaagatgagtaaacgtactggtaatgcgattacattaagagaaattatggacgaagttggcgttgacgctgcacgttatttcttaactatgcgtagtcctgatagtcactttgattttgatatggaattagcgaaagagcaatctcaagacaatccagtttactatgctcaatatgcacatgcgcgtatttgttcaattttaaaacaagcgaaagagcaaggtattgaagtgactgctgcgaatgattttacaacgattacaaatgaaaaagcgattgaattgttgaaaaaagtagctgatttcgaacctacaattgaaagtgctgctgagcatagatcagcacatagaattactaactatattcaagacttggctgctcatttccataaattctataatgctgaaaaagtgttaacagatgatattgaaaaaacaaaagcacatgttgctatgattgaagcggtcagaattacattgaaaaatgcattggcaatggtcggtgtaagcgcacctgaatcaatgtaa

SEQ ID NO: 246 - DNA, 744 bp, Staphylococcus aureus
ttgttagaaacaaaagatttaaatctgtttttaggtaataagcatgtacttaaaaacatttccttatcgataccagtacgcggcgaaataattggtatcatgggcccgaatggtgctggtaaatcttcccttatcaagtctttaattggtgaatttaatgctaccggtactaaattgttatataacaaacctatacaacaacaactgcaacatattacatatattccacaaaaagcacatattgatttagattttcctataagtgtggaacaagtgattttatcaggttgctacaaagaaattggatggtttagacgacctaataaatcagcaagggataaactcaaacagttattaagcgatttagaattagaatctttacgtcatcgacaaatttcagaattaagtggtggacaattacaacgtgtgctagtagcaagagcattgatgtccgaaagtgaagtttattttctagatgagccgtttgtcggaattgattttagtagcgaaaaattaatcatgacaaaaatcgagaacttaaaacaacaaggaaaacttattcttatcatccaccatgatctatcaaaagcaaagcaatactttgatcgcattattctattaaatcaaacattacgatactttggtgatagtgaagaggctatgagtgtcactcgcttaaacgaaacatttatgagtagcactgactgtagtgaccctagtcaaaggagcaatataacatgttag

SEQ ID NO: 247 - DNA, 762 bp, Staphylococcus aureus
atgataattactgaaaaaagacacgagttaatattagaagaactttcgcacaaagattttttgactttacaagaattaatagatcgaactggttgcagtgcttcaacaatacgaagagatttatctaaactacaacaattagggaaattgcaacgtgtgcatggtggtgcaatgttaaaagaaaatcgtatgattgaggcgaatttaactgaaaaattagcaacgaatcttgatgaaaagaaaatgattgctaaaatagcagctaatcaaatcaacgataatgaatgcttatttatcgatgctggttcatctacattggagctaattaaatatattcaagcgaaagatatcattgtggtaaccaatggtttaacacatgtagaagctttacttaaaaaaggtattaaaacaattatgctaggtggtcaagttaaagaaaatacacttgctacgattggttctagtgctatggagatattaagacgatattgtttcgataaagcttttatcgggatgaatggattagatattgaacttggattaactactcccgatgagcaagaggcattagttaaacaaacagcaatgtcattagccaatcaatcatttgtacttatagatcattctaagtttaataaagtatattttgctcgtgtacctttgctagaaagtacgacaatcatcacatctgaaaaagcattaaatcaagaatcgttaaaagaataccaacaaaagtatcactttataggagggactttatga

SEQ ID NO: 248 - DNA, 2157 bp, Staphylococcus aureus
atggaaaaaacaaagacgttattgaatttaagaacaaggtgggtaattttaatgaaaaccatggaagagaaaaagtacaatcatattgaattaaataatgaggtcactaaacgaagagaagatggattctttagtttagaaaaagaccaagaagctttagtagcttatttagaagaagtaaaagacaaaacaatcttcttcgatactgaaatcgagcgtttacgttatttagtagacaacgatttttatttcaatgtgtttgatatttatagtgaagcggatctaattgaaatcactgattatgcaaaatcaatctcgtttaattttgcaagttatatgtcagctagtaaatttttcaaagattacgctttgaaaacaaatgataaaagtcaatacttagaagactataatcaacacgttgccattgttgctttatacctagcaaatggtaataaagcacaagctaaacaatttatttctgctatggttgaacaaagatatcaaccagcgacaccaacatttttaaacgcaggccgtgcgcgtcgtggtgagctagtgtcatgtttcttattagaagtggatgacagcttaaattcaattaactttattgattcaactgcaaaacaattaagtaaaattgggggcggcgttgcaattaacttatctaaattgcgtgcacgtggtgaagcaattaaaggaattaaaggcgtagcgaaaggcgttttacctattgctaagtcacttgaaggtggctttagctatgcagatcaacttggtcaacgccctggtgctggtgctgtgtacttaaatatcttccattatgatgtagaagaatttttagatactaaaaaagtaaatgcggatgaagatttacgtttatctacaatatcaactggtttaattgttccatctaaattcttcgatttagctaaagaaggtaaggacttttatatgtttgcacctcatacagttaaagaagaatatggtgtgacattagacgatatcgatttagaaaaatattatgatgacatggttgcaaacccaaatgttgagaaaaagaaaaagaatgcgcgtgaaatgttgaatttaattgcgcaaacacaattacaatcaggttatccatatttaatgtttaaagataatgctaacagagtgcatccgaattcaaacattggacaaattaaaatgagtaacttatgtacggaaattttccaactacaagaaacttcaattattaatgactatggtattgaagacgaaattaaacgtgatatttcttgtaacttgggctcattaaatattgttaatgtaatggaaagcggaaaattcagagattcagttcactctggtatggacgcattaactgttgtgagtgatgtagcaaatattcaaaatgcaccaggagttagaaaagctaacagtgaattacattcagttggtcttggtgtgatgaatttacacggttacctagcaaaaaataaaattggttatgagtcagaagaagcaaaagattttgcaaatatcttctttatgatgatgaatttctactcaatcgaacgttcaatggaaatcgctaaagagcgtggtatcaaatatcaagactttgaaaagtctgattatgctaatggcaaatatttcgagttctatacaactcaagaatttgaacctcaattcgaaaaagtacgtgaattattcgatggtatggctattcctacttctgaggattggaagaaactacaacaagatgttgaacaatatggtttatatcatgcatatagattagcaattgctccaacacaaagtatttcttatgttcaaaatgcaacaagttctgtaatgccaatcgttgaccaaattgaacgtcgtacttatggtaatgcggaaacattttaccctatgccattcttatcaccacaaacaatgtggtactacaaatcagcattcaatactgatcagatgaaattaatcgatttaattgcgacaattcaaacgcatattgaccaaggtatctcaacgatcctttatgttaattctgaaatttctacacgtgagttagcaagattatatgtatatgcgcactataaaggattaaaatcactttactatactagaaataaattattaagtgtagaagaatgtacaagttgttctatctaa

SEQ ID NO: 249 - DNA, 972 bp, Staphylococcus aureus
atgatagctgttaattggaacacacaagaagatatgacgaatatgttttggagacaaaatatatctcaaatgtgggttgaaacagaatttaaagtatcaaaagacattgcaagttggaagactttatctgaagctgaacaagacacatttaaaaaagcattagctggtttaacaggcttagatacacatcaagcagatgatggcatgcctttagttatgctacatacgactgacttaaggaaaaaagcagtttattcatttatggcgatgatggagcaaatacacgcgaaaagctattcacatattttcacaacactattaccatctagtgaaacaaactacctattagatgaatgggttttagaggaaccccatttaaaatataaatctgataaaattgttgctaattatcacaaactttggggtaaagaagcttcgatatacgaccaatatatggccagagttacgagtgtatttttagaaacattcttattcttctcaggtttctattatccactatatcttgctggtcaagggaaaatgacgacatcaggtgaaatcattcgtaaaattcttttagatgaatctattcatggtgtatttaccggtttagatgcacagcatttacgaaatgaactatctgaaagtgagaaacaaaaagcagatcaagaaatgtataaattgctaaatgacttgtatttaaatgaagagtcatacacaaaaatgttatacgatgatcttggaatcactgaagatgtgctaaactatgttaaatataatggaaacaaagcactttcaaacttaggctttgaaccttattttgaggaacgtgaatttaacccaatcattgagaatgccttagatacaacaactaaaaaccatgacttcttctcagtaaaaggtgatggttatgtattagcattaaacgtagaagcattacaagatgatgactttgtatttgacaacaaataa

SEQ ID NO: 250 - DNA, 924 bp, Staphylococcus aureus
gtgataaataaagacatctatcaagctttacaacaacttatcccaaatgaaaaaattaaagttgatgaacctttaaaacgatacacttatactaaaacaggtggtaatgccgacttttatattacccctactaaaaatgaagaagtacaagcagttgttaaatatgcctatcaaaatgagattcctgttacatatttaggaaatggctcaaatattattatccgtgaaggtggtattcgcggcattgtaattagtttattatcactagatcatatcgatgtatctgatgatgcgataatagccggtagcggcgctgcaattattgatgtctcacgtgttgctcgtgattacgcacttactggccttgaatttgcatgtggtattccaggttcaattggtggtgcagtgtatatgaatgctggcgcttatggtggcgaagttaaagattgtatagactatgcgctttgcgtaaacgaacaaggctcgttaattaaacttacaacaaaagaattagagttagattatcgtaatagcattattcaaaaagaacacttagttgtattagaagctgcatttactttagctcctggtaaaatgactgaaatacaagctaaaatggatgatttaacagaacgtagagaatctaaacaacctttagagtatccttcatgtggtagtgtattccaaagaccgcctggtcattttgcaggtaaattgatacaagattctaatttgcaaggtcaccgtattggcggcgttgaagtttcaaccaaacacgctggttttatggtaaatgtagacaatggaactgctacagattatgaaaaccttattcattatgtacaaaagaccgtcaaagaaaaatttggcattgaattaaatcgtgaagttcgcattattggtgaacatccaaaggaatcgtaa

SEQ ID NO: 251 - DNA, 933 bp, Staphylococcus aureus
atgttaacgacagaaaaactagttgaaacattaaagttagatttaatcgctggtgaagaaggactatcgaagccaattaaaaatgctgatatatcaagaccaggcttagagatggcaggttatttttcacattatgcgtcagatagaatacaactattaggaacaacggaactatcgttttacaatttattaccagataaggatcgcgcaggtcgtatgcgtaaactatgcagaccagaaacgcctgcaattattgtgacacgtggattgcagccaccagaagaattagttgaagctgcaaaagaattaaataccccacttatagttgctaaagatgcgactacaagtttaatgagtcgcttaacaacgtttttagagcatgcacttgcaaagacgacatctttacatggtgttttagtagatgtttacggtgttggtgtactaattaccggtgattcaggaataggtaaaagtgagactgcgttggaattagttaaacgtgggcatagattagtagcagatgataatgtagaaatacgtcaaattaataaagatgaactaatagggaaaccaccaaagttaatagaacatctattagaaatacgtggactaggtattatcaatgttatgactttatttggcgcgggttcaatattaactgaaaaacgaattagattaaatattaatttggaaaactggaacaagcaaaagttatatgaccgcgtaggtcttaatgaagagacgctaagtattttagatactgaaatcactaaaaaaacaatacctgtaagacctggtagaaatgttgcggtaattattgaggtcgctgcaatgaactatcgattaaatatcatgggcattaacactgccgaagaatttagtgaaagattaaatgaagaaattatcaagaacagtcataagagtgaggagtag

SEQ ID NO: 252 - DNA, 936 bp, Staphylococcus aureus
atgactgaaatagattttgatatagcaattatcggtgcaggtccagctggtatgactgctgcagtatacgcatcacgtgctaatttaaaaacagttatgattgaaagaggtattccaggcggtcaaatggctaatacagaagaagtagagaacttccctggtttcgaaatgattacaggtccagatttatctacaaaaatgtttgaacacgctaaaaagtttggtgcagtttatcaatatggagatattaaatctgtagaagataaaggcgaatataaagtgattaactttggtaataaagaattaacagcgaaagcggtcattattgctacaggtgcagaatacaagaaaattggtgttccgggtgaacaagaacttggtggacgcggtgtaagttattgtgcagtatgtgatggtgcattctttaaaaataaacgcctattcgttatcggtggtggtgactcagcagtagaagagggaacattcttaactaaatttgctgacaaagtaacaatcgttcaccgtcgtgatgagttacgtgcacagcgtattttacaagatagagcattcaaaaatgataaaatcgactttatttggagtcatactttgaaatcaattaatgaaaaagacggcaaagtgggttctgtgacattaacgtctacaaaagatggttcagaagaaacacacgaggctgatggtgtattcatctatattggtatgaaaccattaacagcgccatttaaagacttaggtattacgaatgatgttggttatattgtgacaaaagatgatatgacaacatcagtaccaggtatttttgcagcaggagatgttcgtgacaaaggtttacgccaaattgtcactgctactggcgatggtagtattgcagcgcaaagtgcagcggaatatattgaacatttaaacgatcaagcttaa

SEQ ID NO: 253 - DNA, 1011 bp, Staphylococcus aureus
atggcagtaaaagtagcaattaatggttttggtagaattggtcgtttagcattcagaagaattcaagaagtagaaggtcttgaagttgtagcagtaaacgacttaacagatgacgacatgttagcgcatttattaaaatatgacactatgcaaggtcgtttcacaggtgaagtagaggtagttgatggtggtttccgcgtaaatggtaaagaagttaaatcattcagtgaaccagatgcaagcaaattaccttggaaagacttaaatatcgatgtagtgttagaatgtactggtttctacactgataaagataaagcacaagctcatattgaagcaggcgctaaaaaagtattaatctcagcaccagctactggtgacttaaaaacaatcgtattcaacactaaccaccaagagttagacggttctgaaacagttgtttcaggtgcttcatgtactacaaactcattagcaccagttgctaaagttttaaacgatgactttggtttagttgaaggtttaatgactacaattcacgcttacacaggtgatcaaaatacacaagacgcacctcacagaaaaggtgacaaacgtcgtgctcgtgcagcggcagaaaacatcatccctaactcaacaggtgctgctaaagctatcggtaaagttattcctgaaatcgatggtaaattagatggtggtgcacaacgtgttcctgtagctacaggttcattaactgaattaacagtagtattagaaaaacaagacgtaacagttgaacaagttaacgaagctatgaaaaatgcttcaaacgaatcattcggttacactgaagacgaaatcgtttcttcagacgttgtaggtatgacttacggttcattattcgacgctacacaaactcgtgtaatgtcagttggcgaccgtcaattagttaaagttgcagcttggtatgataacgaaatgtcatatactgcacaattagttcgtacattagcatacttagctgaactttctaaataa

SEQ ID NO: 254 - DNA, 1191 bp, Staphylococcus aureus
atggctaaaaaaattgtttctgatttagatcttaaaggtaaaacagtcctagtacgtgctgattttaacgtacctttaaaagacggtgaaattactaatgacaaccgtatcgttcaagctttacctacaattcaatacatcatcgaacaaggtggtaaaatcgtactattttcacatttaggtaaagtgaaagaagaaagtgataaagcaaaattaactttacgtccagttgctgaagacttatctaagaaattagataaagaagttgttttcgtaccagaaacacgcggcgaaaaacttgaagctgctattaaagaccttaaagaaggcgacgtattattagttgaaaatacacgttatgaagatttagacggtaaaaaagaatctaaaaatgatccagaattaggtaaatactgggcatctttaggtgatgtgtttgtaaatgatgcttttggtactgcgcatcgtgagcatgcatctaatgttggtatttctacacatttagaaactgcagctggattcttaatggataaagaaattaagtttattggtggcgtagttaacgatccacataaaccagttgttgctattttaggtggagcaaaagtatctgacaaaattaatgtcatcaaaaacttagttaacatagctgataaaattatcatcggcggaggtatggcttatactttcttaaaagcgcaaggtaaagaaattggtatttcattattagaagaagataaaatcgacttcgcaaaagatttattagaaaaacatggtgataaaattgtattaccagtagacactaaagttgctaaagaattttctaatgatgccaaaatcactgtagtaccatctgattcaattccagcagaccaagaaggtatggatattggaccaaacactgtaaaattatttgcagatgaattagaaggtgcgcacactgttgtatggaatggacctatgggtgtattcgagttcagtaactttgcacaaggtacaattggtgtatgtaaagcaattgcaaaccttaaagatgcaattacgattatcggtggcggtgattcagctgcagcagcaatctctttaggttttgaaaatgacttcactcatatttcaactggtggcggcgcgtcattagagtacctagaaggtaaagaattgcctggtatcaaagcaatcaataataaataa

SEQ ID NO: 255 - DNA, 762 bp, Staphylococcus aureus
atgagaacaccaattatagctggtaactggaaaatgaacaaaacagtacaagaagcaaaagacttcgtcaatgcattaccaacattaccagattcaaaagaagtagaatcagtaatttgtgcaccagcaattcaattagatgcattaactactgcagttaaagaaggaaaagcacaaggtttagaaatcggtgctcaaaatacgtatttcgaagataatggtgcgttcacaggtgaaacgtctccagttgcattagcagatttaggcgttaaatacgttgttatcggtcattctgaacgtcgtgaattattccacgaaacagatgaagaaattaacaaaaaagcgcacgctattttcaaacatggaatgactccaattatttgtgttggtgaaacagacgaagagcgtgaaagtggtaaagctaacgatgttgtaggtgagcaagttaagaaagctgttgcaggtttatctgaagatcaacttaaatcagttgtaattgcttatgagccaatctgggcaatcggaactggtaaatcatcaacatctgaagatgcaaatgaaatgtgtgcatttgtacgtcaaactattgctgacttatcaagcaaagaagtatcagaagcaactcgtattcaatatggtggtagtgttaaacctaacaacattaaagaatacatggcacaaactgatattgatggggcattagtaggtggcgcatcacttaaagttgaagatttcgtacaattgttagaaggtgcaaaataa

SEQ ID NO: 256 - DNA, 1305 bp, Staphylococcus aureus
atgccaattattacagatgtttacgctcgcgaagtcttagactctcgtggtaacccaactgttgaagtagaagtattaactgaaagtggcgcatttggtcgtgcattagtaccatcaggtgcttcaactggtgaacacgaagctgttgaattacgtgatggagacaaatcacgttatttaggtaaaggtgttactaaagcagttgaaaacgttaatgaaatcatcgcaccagaaattattgaaggtgaattttcagtattagatcaagtatctattgataaaatgatgatcgcattagacggtactccaaacaaaggtaaattaggtgcaaatgctattttaggtgtatctatcgcagtagcacgtgcagcagctgacttattaggtcaaccactttacaaatatttaggtggatttaatggtaagcagttaccagtaccaatgatgaacatcgttaatggtggttctcactcagatgctccaattgcattccaagaattcatgattttacctgtaggtgctacaacgttcaaagaatcattacgttggggtactgaaattttccacaacttaaaatcaattttaagcaaacgtggtttagaaactgcagtaggtgacgaaggtggtttcgctcctaaatttgaaggtactgaagatgctgttgaaacaattatccaagcaatcgaagcagctggttacaaaccaggtgaagaagtattcttaggatttgactgtgcatcatcagaattctatgaaaatggtgtatatgactacagtaagttcgaaggcgaacacggtgcaaaacgtacagctgcagaacaagttgactacttagaacaattagtagacaaatatcctatcattacaattgaagacggtatggacgaaaacgactgggatggttggaaacaacttacagaacgtatcggtgaccgtgtacaattagtaggtgacgatttattcgtaacaaacactgaaattttagcaaaaggtattgaaaacggaattggtaactcaatcttaattaaagttaaccaaatcggtacattaactgaaacatttgatgcaatcgaaatggctcaaaaagctggttacacagcagtagtttctcaccgttcaggtgaaacagaagatacaacaattgctgatattgctgttgctacaaacgctggtcaaattaaaactggttcattatcacgtactgaccgtattgctaaatacaatcaattattacgtatcgaagatgaattatttgaaactgctaaatatgacggtatcaaatcattctataacttagataaataa

SEQ ID NO: 257 - DNA, 1068 bp, Staphylococcus aureus
atgtggaataagaatcgacttactcaaatgttaagtattgaatatccaattatacaagcaggtatggcaggaagtacgacaccgaaattagttgcatcagtaagtaacagtggtgggttaggcacaataggcgcaggttactttaatacgcagcaattggaagatgaaatagattatgtacgccaattaacgtcaaattcttttggcgtaaatgtctttgtaccaagtcaacaatcatataccagtagtcaaattgaaaatatgaatgcatggttaaaaccttatcgacgcgcattacatttagaagagccggttgtaaaaattatcgaagaacaacaatttaagtgtcatattgatacgataattaaaaagcaagtgcctgtatgttgttttacttttggaattcaaaatgaatctattatagaaagattgaaagaagcaaacattaagctaataggtacagcaacaagtgttgatgaagctattgcgaatgaaaaagcgggtatggatgctatcgttgctcaaggtagtgaagcaggtggacatcgtggttcatttttaaaacctaaaaatcaattacctatggttggaacaatatctttagtgccacaaattgtagatgtcgtttcaattccggtcattgccgctggtggaattatggacggtagaggagttttggcaagtattgtcttaggtgcagaaggggtacaaatgggcactgcatttttaacatcacaagatagtaatgcatcagaactactacgagacgcaattataaatagtaaagaaacagatacagtcgttacaaaagcgtttagtggaaagcttgcacgcggtatcaacaataggtttatcgaagaaatgtcccaatacgaaggcgatatcccagattatccaatacaaaatgagctaacaagtagcataagaaaagccgcagcaaacatcggcgacaaagagttaacacatatgtggagtggacaaagcccgcgactagcaacaacgcatcccgccaacaccatcatgtccaatataatcaatcaaattaatcaaatcatgcaatataaataa

SEQ ID NO: 258 - DNA, 576 bp, Staphylococcus aureus
ttgaaaaaagaattattggaatggattatttcaattgcagtcgcttttgtcattttatttatagtaggtaaatttattgttacaccatatacaattaaaggtgaatcaatggatccaactttgaaagatggcgagcgagtagctgtaaacattattggatataaaacaggtggtttggaaaaaggtaatgtagttgtcttccatgcaaacaaaaatgatgactatgttaaacgtgtcatcggtgttcctggtgataaagtagaatataaaaatgatacattatatgtcaatggtaaaaaacaagatgaaccatatttaaactataatttaaaacataaacaaggtgattacattactgggactttccaagttaaagatttaccgaatgcgaatcctaaatcaaatgtcattccaaaaggtaaatatttagttcttggagataatcgtgaagtaagtaaagatagccgtgcgtttggcctcattgatgaagaccaaattgttggtaaagtttcatttagattctggccatttagtgaatttaaacataatttcaatcctgaaaatactaaaaattaa

SEQ ID NO: 259 - DNA, 942 bp, Staphylococcus aureus
atgaacgtgggtattaaaggttttggtgcatatgcaccagaaaagattattgacaatgcctattttgagcaatttttagatacatctgatgaatggatttctaagatgactggaattaaagaaagacattgggcagatgacgatcaagatacttcagatttagcatatgaagcaagtgtaaaagcaatcgctgacgctggtattcagcctgaagatatagatatgataattgttgccacagcaactggagatatgccatttccaactgtcgcaaatatgttgcaagaacgtttagggacgggcaaagttgcctctatggatcaacttgcagcatgttctggatttatgtattcaatgattacagctaaacaatatgttcaatctggagattatcataatattttagttgtcggtgcagataaattatctaaaataacagatttaactgaccgttctactgcagttctatttggagatggtgcaggtgcggttatcatcggtgaagtttcagaaggcagaggtattataagttatgaaatgggttctgatggcactggtggtaaacatttatatttagataaagatactggtaaactgaaaatgaatggtcgagaagtatttaaatttgctgttagaattatgggtgatgcatcaacacgtgtagttgaaaaagcgaatttaacatcagatgatatagatttatttattcctcatcaagctaatattagaattatggaatcagctagagaacgcttaggtatttcaaaagacaaaatgagtgtttctgtaaataaatatggaaatacttcagctgcgtcaatacctttaagtatcgatcaagaattaaaaaatggtaaactcaaagatgatgatacaattgttcttgtcggattcggtggcggcctaacttggggcgcaatgacaataaaatggggaaaatag

SEQ ID NO: 260 - DNA, 1245 bp, Staphylococcus aureus
atgagtcaaaataaaagagtagttattacaggtatgggagccctttctccaatcggtaatgatgtcaaaacaacatgggagaatgctctaaaaggcgtaaatggtatcgataaaattacacgtatcgatactgaaccttatagcgttcacttagcaggagaacttaaaaactttaatattgaagatcatatcgacaaaaaagaagcgcgtcgtatggatagatttactcaatatgcaattgtagcagctagagaggctgttaaagatgcgcaattagatatcaatgataatactgcagatcgaatcggtgtatggattggttctggtatcggtggtatggaaacatttgaaattgcacataaacaattaatggataaaggcccaagacgtgtgagtccatttttcgtaccaatgttaattcctgatatggcaactgggcaagtatcaattgacttaggtgcaaaaggaccaaatggtgcaacagttacagcatgtgcaacaggtacaaactcaatcggagaagcatttaaaattgtgcaacgcggtgatgcagatgcaatgattactggtggtacggaagctccaatcactcatatggcaattgcaggtttcagtgcaagtcgagcgctttctacaaatgatgacattgaaacagcatgtcgtccattccaagaaggtagagacggttttgttatgggtgaaggtgctggtattttagtaatcgaatctttagaatcagcacaagctcgaggtgccaatatttatgctgagatagttggctatggtactacaggtgatgcttatcatattacagcgccagctccagaaggtgaaggcggttctagagcaatgcaagcagctatggatgatgctggtattgaacctaaagatgtacaatacttaaatgcccatggtacaagtactcctgttggtgacttaaatgaagttaaagctattaaaaatacatttggtgaagcagctaaacacttaaaagttagctcaacaaaatcaatgactggtcacttacttggtgcaacaggtggaattgaagcaatcttctcagcgctttcaattaaagactctaaagtcgcaccgacaatacatgcggtaacaccagacccagaatgtgatttggatattgttccaaatgaagcgcaagaccttgatattacttatgcaatgagtaatagcttaggattcggtggacataacgcagtattagtattcaagaaatttgaagcataa

SEQ ID NO: 261 - DNA, 942 bp, Staphylococcus aureus
atgaaaaatgatgaagtgctattatctattaaaaatttaaagcaatattttaacgcaggaaagaaaaacgaagtgagagcgattgaaaatatttcgtttgatatatacaaaggggaaacattaggtttagtaggagaatcggggtgtggtaaatctacaactggtaaatcaattattaaacttaatgatattacaagtggagaaattttgtatgagggtattgatatacaaaagattcgtaaacgtaaagatttgcttaaatttaataaaaagatacagatgatttttcaagacccatatgcgtctttaaatcctaggttaaaagtaatggatatagtagctgaaggtattgatatccatcatttagcaactgataagcgtgaccgaaaaaaacgtgtctatgatttacttgaaactgttggattaagtaaagaacatgccaatcgctatcctcatgaattttcaggtggacaacgccaacgtattggaattgcccgtgcattagccgttgaaccagaattcattatcgcggacgaaccaatatcggcattggatgtttcaatccaagctcaagtagttaatttattattaaaattacaacgtgaaagagggattacgttcctatttatagctcatgatctatcaatggtgaagtatatttcagatcgtattgcagtcatgcattttgggaaaatagttgaaattggaccggcagaagaaatttatcaaaatccattacacgattatactaagtctttattatcagccattccacaacctgatcctgaatcagaacgcagtcgcaaacgatttagttatattgatgatgaagcaaataatcatttaagacaattacatgaaattagaccgaatcactttgtctttagtactgaagaagaagcggcacaactacgagaaaataaattggtgacacaaaattaa

SEQ ID NO: 262 - DNA, 810 bp, Staphylococcus aureus
atgcgttatacaattttaactaaaggtgactccaagtctaatgccttaaagcataaaatgatgaactatatgaaagattttcgcatgattgaggatagtgaaaatcctgaaattgttatttcagttggtggtgatggtacattactacaagcattccatcagtatagccacatgttatcaaaagtggcatttgttggagttcatacaggtcatttaggattttatgcggattggttacctcatgaagttgaaaaattaatcatcgaaattaataattcagagtttcaggtcattgaatatccattgcttgaaattattatgagatacaacgacaacggctatgaaacaaggtatttagcattaaatgaagcaacgatgaaaactgaaaatggctcaacacttgttgtggatgttaacttaagagggaaacactttgagcgatttagaggcgatggattatgtgtatcaacaccttcgggttcaacggcttataacaaagcgctaggtggcgcactgatacatccttcacttgaagcaatgcaaattacagaaattgcctcaataaataatcgtgtgtttagaacggtaggatcaccacttgtattaccaaagcatcatacatgtttaatatcaccagttaatcatgataccattagaatgacgatagatcatgttagtatcaaacataaaaatgttaattcaatacaataccgtgtagcaaatgaaaaagtgaggtttgcacgttttagaccattcccgttctggaaacgtgtacacgattctttcatatcaagtgatgaagaacgatga

SEQ ID NO: 263 - DNA, 771 bp, Staphylococcus aureus
atgttaaatcttgaaaacaaaacatatgtcatcatgggaatcgctaataagcgtagtattgcttttggtgtcgctaaagttttagatcaattaggtgctaaattagtatttacttaccgtaaagaacgtagccgtaaagagcttgaaaaattattagaacaattaaatcaaccagaagcgcacttatatcaaattgatgttcaaagcgatgaagaggttattaatggttttgagcaaattggtaaagatgttggcaatattgatggtgtatatcattcaatcgcatttgctaatatggaagacttacgcggacgcttttctgaaacttcacgtgaaggcttcttgttagctcaagacattagttcttactcattaacaattgtggctcatgaagctaaaaaattaatgccagaaggtggtagcattgttgcaacaacatatttaggtggcgaattcgcagttcaaaattataatgtgatgggtgttgctaaagcgagcttagaagcaaatgttaaatatttagcattagacttaggtcctgataatattcgcgttaatgcaatttcagctggtccaatccgtacattaagtgcaaaaggtgtgggtggtttcaatacaattcttaaagaaatcgaagagcgtgcacctttaaaacgtaacgttgatcaagtagaagtaggtaaaacagcggcttacttattaagtgacttatcaagtggcgttacaggtgaaaatattcatgtagatagcggattccacgcaattaaataa

SEQ ID NO: 264 - DNA, 1485 bp, Staphylococcus aureus
ttggatgcaagtacgttgtttaagaaagtaaaagtaaagcgtgtattgggttctttagaacaacaaatagatgatatcactactgattcacgtacagcgagagaaggtagcatttttgtcgcttcagttggatatactgtagacagtcataagttctgtcaaaatgtagctgatcaagggtgtaagttggtagtggtcaataaagaacaatcattaccagctaacgtaacacaagtggttgtgccggacacattaagagtagctagtattctagcacacacattatatgattatccgagtcatcagttagtgacatttggtgtaacgggtacaaatggtaaaacttctattgcgacgatgattcatttaattcaaagaaagttacaaaaaaatagtgcatatttaggaactaatggtttccaaattaatgaaacaaagacaaaaggtgcaaatacgacaccagaaacagtttctttaactaagaaaattaaagaagcagttgatgcaggcgctgaatctatgacattagaagtatcaagccatggcttagtattaggacgactgcgaggcgttgaatttgacgttgcaatattttcaaatttaacacaagaccatttagattttcatggcacaatggaagcatacggacacgcgaagtctttattgtttagtcaattaggtgaagatttgtcgaaagaaaagtatgtcgtgttaaacaatgacgattcattttctgagtatttaagaacagtgacgccttatgaagtatttagttatggaattgatgaggaagcccaatttatggctaaaaatattcaagaatctttacaaggtgtcagctttgattttgtaacgccttttggaacttacccagtaaaatcgccttatgttggtaagtttaatatttctaatattatggcggcaatgattgcggtgtggagtaaaggtacatctttagaaacgattattaaagctgttgaaaatttagaacctgttgaagggcgattagaagttttagatccttcgttacctattgatttaattatcgattatgcacatacagctgatggtatgaacaaattaatcgatgcagtacagccttttgtaaagcaaaagttgatatttttagttggtatggcaggcgaacgtgatttaactaaaacgcctgaaatggggcgagttgcctgtcgtgcagattatgtcattttcacaccggataatccggcaaatgatgacccgaaaatgttaacggcagaattagccaaaggtgcaacacatcaaaactatattgaatttgatgatcgtgcagaagggataaaacatgcaattgacatagctgagcctggggatactgtcgttttagcatcaaaaggaagagaaccatatcaaatcatgccagggcatattaaggtgccacatcgagatgatttaattggccttgaagcagcttacaaaaagttcggtggtggccctgttgatcaataa

SEQ ID NO: 265 - DNA, 72 bp, Staphylococcus aureus
tccacagtagctcagtggtagagctatcggctgttaaccgatcggtcgtaggttcgagtcctacctgtggag

SEQ ID NO: 266 - DNA, 89 bp, Staphylococcus aureus
ggaaacgtactcaagttggctgaagaggcgcccctgctaagggtgtaggtcgcgaaagcggcgcgagggttcgaatccctccgtttccg

SEQ ID NO: 267 - DNA, 1173 bp, Staphylococcus aureus
atgaaaatagcaactctgaacaaaggcaaagaaacaaaatattttaatggatatcctttaattgaagaagaggatatctattcacaagatcatttaaaagaaggagatatttttcaaattgtgactgataaatcacaatatgttgcaacggcttatgttggtcgccaacataaaggattaggttgggttctaacatacgataaagctcaagaaatcaacacagctttctttgtgaaattgtttaatactgcattagcagaacgtgattattattttaatatagatggaacaaatgcttttagattatttaatgctgaaggtgatggtgttgggggattaacaatcgacaattacgatggtcatttgttgattcaatggtactcaaaaggtatttataaatttaaatatgccattcttgaagcggttagaaaagtatttgattataaatctatttacgaaaaagtaagatttaaagacagcgaatatagtggtggttttgttgaaggcgatgcacctgagtttccaattgttatcgaagaaaacttcacattttataatgtagaccttgaagatggtttgatgacaggtatctttttagatcaaaaagaagtgcgcaagaaattaaggggtcaatatgccaaagaacgccatgttttaaacttatttagttatacaggtgctttttctgtaatagcagcaagtgaggcatcttcaacaacaagtgtagatttggctaatcgttctcgtagtttaactgaagaaaattttggattaaatgctattgatcctaaatcccaatatatttatgtcatggacacttttgatttctataaatatgctgcacgacatggacatagttatgacacgatcgtgattgatccacctagctttgcacgcaacaaaaaacgtacattttcagtgcaaaaagattatgacaaattaattaatggcgccttaaatattttatcatctgaaggaacattattgttatgtacaaatgcaagtgtatatccattaaagcaatttaaaaatactattaaaaagacgcttgaagagagtggcgttgattatgaattaactgaagttatgggtttaccaaaagattttaaaacgcatccacattataagccatctaaatatttaaaagctgtttttgtaaatattagacattaa

SEQ ID NO: 268 - DNA, 267 bp, Staphylococcus aureus
atggaacaaaattcatatgtaatcatcgacgagactggtattcacgctagaccagcaacaatgttagtacaaacagcttcaaaattcgattctgatattcaattagaatataacggtaagaaagtaaacttaaaatcaatcatgggtgttatgagccttggtgttggtaaagatgctgaaattacaatttatgctgacggtagtgatgaatctgacgccattcaagcaatcagtgacgtcttatcaaaagaaggattgactaaataa

SEQ ID NO: 269 - DNA, 1719 bp, Staphylococcus aureus
atgtctaaattaattaaaggtattgctgcatctgatggtgtcgcaattgctaaagcttatttattagttgagccagacttaacattcgacaaaaatgaaaaagtcactgatgttgaaggagaagttgcaaagttcaatagcgctatcgaagcttctaaagttgagttaactaaaattagaaataatgcagaggttcaactaggtgctgataaagctgctatctttgatgcacatttattagttttagatgaccctgaattaattcaaccaatccaagataagattaaaaatgaaaacgctaatgctgctacagcattaacggatgtaacaacacaatttgttacaatttttgaatctatggataacgaatacatgaaagaacgtgcggctgatattcgcgacgtttctaaacgtgtgttatcacatattttaggtgtagaattaccgaatccgagtatgattgatgaaagcgttgttattgtagggaatgacttaacgccatctgatactgctcaattaaataaagaattcgtacaaggttttgctacaaacattggcggaagaacaagtcactctgcaattatgagtcgttctttagaaattccagcaattgttggtacaaaatcaattactcaagaagttaaacaaggcgacattattatcgtagatggattaaatggtgatgtaatcgttaatccaactgaagatgagttaatcgcttatcaagataaacgtgagtgttattttgctgacaagaaagaattacaaaaactacgtgatgctgatactgttacagttgatggtgttcacgcagagcttgctgcaaatattggtacacctaatgatttgccaggtgttattgaaaatggtgcacaaggtatcggcttatatagaactgagtttttatatatgggtcgtgaccaaatgcctacagaagaagaacaatttgaagcttataaagaagtattagaagcaatggacggtaaacgtgttgttgtacgtactttagatataggtggagataaagaattatcatacttaaacttgcctgaagaaatgaatccattcttaggttaccgtgcgattcgtttatgccttgcgcaacaagatattttcagaccacagctacgtgcattattacgtgcatcagtttatggtaagttaaatatcatgttcccaatggttgcaacaattaacgaatttagagaagcaaaagctatattattagaagaaaaagaaaaccttaaaaatgaaggtcatgacatttcggatgatatagaattaggaatcatggtagagatacctgcaacagcagcattagctgatgtctttgctaaagaagtagatttcttcagtatcggtacaaatgatttaattcaatacacattagctgctgaccgtatgtcagagcgtgtatcatatctataccaaccatataacccttcaatcttacgtttagttaaacaagttattgaagcgtcacataaagaaggtaaatggacaggtatgtgtggtgaaatggctggagatgaaacagctattccattattgcttggtttaggtttagatgagttctctatgagtgcaacgtctattctgaaagcaagaagacaaattaatggtttaagtaaaaatgaaatgactgaacttgctaaccgtgcagtcgactgtgcaacgcaagaagaagttattgaattagttaacaactacgtaaaataa

SEQ ID NO: 270 - DNA, 1698 bp, Staphylococcus aureus
atgaaacaattacatccaaatgaagtaggtgtatatgcacttggaggtctaggtgaaatcggtaaaaatacttatgcagttgagtataaagacgaaattgtcattatcgatgcaggtatcaaattccctgatgataacttattagggattgattatgttatacctgactacacatatctagttcaaaaccaagataaaattgttggcctatttataacacatggtcacgaagaccatataggcggtgtgcccttcctattaaaacaacttaatatacctatttatggtggtcctttagcattaggtttaatccgtaataaacttgaagaacatcatttattacgtactgctaaactaaatgaaatcaatgaggacagtgtgattaaatctaagcactttacgatttctttctacttaactacgcatagtattcctgaaacttatggcgtcatcgtagatacacctgaaggaaaagtagttcataccggtgactttaaatttgattttacacctgtaggcaaaccagcaaacattgctaaaatggctcaattaggcgaagaaggcgttctatgtttactttcagactcaacaaattcacttgtgcctgattttactttaagcgaacgtgaagttggtcaaaacgtagataagatcttccgtaattgtaaaggtcgtattatatttgctaccttcgcttctaatatttaccgagttcaacaagcagttgaagctgctatcaaaaataaccgtaaaattgttacgttcggtcgttcgatggaaaacaatattaaaatcggtatggaacttggttatattaaagcaccacctgaaacatttattgaacctaataaaattaataccgtaccgaagcatgagttattgatactatgtactggttcacaaggtgaaccaatggcagcattatctagaattgctaatggtactcataagcaaattaaaattatacctgaagataccgttgtatttagttcatcacctatcccaggtaatacaaaaagtattaacagaactattaattccttgtataaagctggtgcagatgttatccatagcaagatttctaacatccatacttcagggcatggttctcaaggtgatcaacaattaatgcttcgattaatcaagccgaaatatttcttacctattcatggtgaataccgtatgttaaaagcacatggtgagactggtgttgaatgcggcgttgaagaagataatgtcttcatctttgatattggagatgtcttagctttaacacacgattcagcacgtaaagctggtcgcattccatctggtaatgtacttgttgatggtagtggtatcggtgatatcggtaatgttgtaataagagaccgtaagctattatctgaagaaggtttagttatcgttgttgttagtattgattttaatacaaataaattactttctggtccagacattatttctcgaggatttgtatatatgagggaatcaggtcaattaatttatgatgcacaacgcaaaatcaaaactgatgttattagtaagttaaatcaaaataaagatattcaatggcatcagattaaatcttctatcattgaaacattacaaccttatttatttgaaaaaacagctagaaaaccaatgattttaccagtcattatgaaggtaaacgaacaaaaagaatcaaacaataaataa

SEQ ID NO: 271 - DNA, 543 bp, Staphylococcus aureus
atgcgcgtcattgcaggtaaacataaaagtaaagctttagaaagtatggaaggccgtaatacgagaccaactatggataaagttaaagaaggtatctttaatagtttatatgatgtgtcaggtataggtttagatttatttgcaggaagcggggcgcttggaatagaagcactctctcgaggtatggataaggtaatctttgttgatcaaaattttaaagctgtaaaagttattaaatcaaatcttgcgaatttggatttagaggcacaatctgaagtttataaaaataatgcagatagagctttaaaagcattgtcaaaacgtgatattcaatttgatgtcattttcttagatccaccttataataaaggtctcattgataaagctttaaaactaatttcagagtttaatttattgaaagaaaatggtatcatcgtttgtgaatttagcaatcatgaagaaatagactatcaaccgtttaatatgattaaacgttaccattatgggttgacagacacattgttattagaaaagggagaatag

SEQ ID NO: 272 - DNA, 483 bp, Staphylococcus aureus
atggaacatacaatagcggtcattccgggtagttttgaccccattacttatggtcatttagacattattgagagaagtacagatagatttgatgaaattcatgtctgtgttcttaaaaatagtaaaaaagaaggtacgtttagtttagaagagcgtatggatttaattgaacaatctgttaaacatttacctaatgtcaaggttcatcaatttagtggtttactagtcgattattgtgaacaagtaggagctaaaacaatcatacgtggtttaagagcagtcagtgattttgaatatgaattacgcttaacttcaatgaataaaaagttgaacaatgaaattgaaacgttatatatgatgtctagtactaattattcatttataagttcaagtattgttaaagaagttgcagcttatcgagcagatatttctgaattcgttccaccttatgttgaaaaggcattgaagaagaaatttaagtaa

SEQ ID NO: 273 - DNA, 1059 bp, Staphylococcus aureus
atgtctgaacaacaaacaatgtcagagttaaaacaacaagcgcttgtagatattaatgaagcaaatgatgaacgtgcactgcaagaagttaaagtgaaatacttaggtaaaaaagggtcagttagcggactaatgaaattgatgaaggatttgccgaatgaagagaaacctgcgtttggtcaaaaagtgaatgaattgcgtcaaacaattcaaaatgaattagatgaaagacaacagatgttagttaaagaaaaattaaataagcaattggctgaagaaacaattgatgtatcattaccaggtcgtcatattgaaatcggttcaaagcatccattaacacgtacaatagaagaaattgaagacttattcttaggtttaggttatgaaattgtgaatggatatgaagttgaacaagatcattataacttcgaaatgctgaatttacctaaatcacaccctgcacgtgatatgcaagatagtttctatattacggatgaaattttattacgtacgcatacatcaccagtgcaggcacgtacgatggaatcacgtcatggtcaaggtccagttaaaattatttgccctggtaaagtgtatcgtcgtgactctgatgatgcgacacatagtcatcaatttacacaaatcgaaggattagttgttgataaaaacgttaaaatgagtgatttgaaaggcactttagaattgttagctaagaaattatttggtgctgatcgtgaaattcgtttacgtccaagttacttcccattcactgaaccttctgtagaagttgatgtgtcatgttttaaatgtaaaggaaaaggttgtaatgtgtgtaaacacacaggatggattgaaattttaggtgctggaatggtacatcctaatgtattagaaatggctggttttgattcttcagagtactctggatttgcatttggtatgggaccagaccgtattgcaatgttgaaatatggtatagaagatattcgtcatttctatactaatgatgtgagatttttagatcaatttaaagcggtagaagatagaggtgacatgtaa

SEQ ID NO: 274 - DNA, 2403 bp, Staphylococcus aureus
atgttgatatcaaatgaatggttgaaagaatatgtaacaatcgatgattctgtaagtgatttggcagaacgtattacgcgcacaggtattgaagtggatgatttaattgactacacaaaagatatcaaaaatttagttgtcggtttcgttaagtcaaaagagaaacatcctgatgccgataaattaaatgtttgccaagttgatatcggagaagacgaacctgtacaaatcgtatgtggtgcaccgaacgttgatgcaggacaatatgtcattgttgctaaagtaggtggcagattgcctggtggtattaaaattaagcgtgccaaattacgcggtgaacgttcagaaggtatgatttgttcgttacaagaaattggtatttcaagtaactatataccgaaaagttttgaatcaggcatttatgtttttagtgaatcccaagttccaggaacagatgccttacaagctttatatttagatgatcaagtaatggaatttgatttaacgccgaatcgtgcagatgctttaagtatgataggtactgcttatgaagttgcagcattatataatacaaaaatgactaagccagagacaacatcaaatgagcttgagttatctgcaaatgatgaattgactgtgacaattgaaaatgaagataaagtaccatattatagtgcacgtgttgttcacgacgtgacaattgaaccttcgccaatttggatgcaagcacgcttaataaaagcgggtatacgtcctattaataatgttgttgacatttcaaattatgtgttattagaatacggtcaaccattgcacatgtttgatcaagatgcgattggttcacaacaaattgttgttcgtcaagctaatgaaggcgaaaaaatgacaacattagatgatacagaacgtgaattattaacgagcgatattgtcattactaatggacaaactccaattgcattagctggtgttatgggtggcgatttttcagaagttaaagaacaaacatcaaatatagtgattgaaggtgctatttttgatccagtttcaattcgtcatacatcaagacgtttaaatttacgcagtgaatcatctagtcgttttgaaaaaggaatagctactgaatttgtagatgaagcagtcgaccgtgcatgttatttattacaaacttatgcaaacggaaaagtgctaaaagatagagtgtcttcaggagaacttggtgcatttattacaccaatcgacatcactgctgataaaattaatcgcactattggatttgatttgtcacaaaatgatattgttactatttttaatcaactagggtttgatacagaaataaatgatgatgttattacagtgctagtaccatcacgtcgtaaagatattacaattaaagaagatttaattgaagaagttgcacgtatatatggatacgacgatattccatcaacgttacctgtcttcgataaagttactagtggtcagctaactgatcgccaatataaaactagaatggttaaagaagtgttagaaggtgctggattagatcaagctattacgtattcgttagtttctaaagaggatgctactgcattttcgatgcaacagcgtcaaacaattgatttattgatgccaatgagtgaagcgcatgcgtcattacgtcaaagtttattaccacatttaatcgaagcagcatcatataatgtggcacgcaaaaataaagatgtaaaattatttgaaatcggcaatgtcttctttgctaatggagaaggtgaactaccagatcaagttgaatatttaagtggtattttaactggagattatgtagtcaatcaatggcaaggtaagaaagaaacggttgatttctatttagcaaaaggtgtcgtggatcgagtatctgaaaagttaaaccttgaatttagttatcgtcgtgctgatattgatggattacatccaggtcgtactgctgaaatcttattagagaataaagttgttggttttattggtgaattacatccaacattagcagctgataatgatttaaaacgtacgtatgtttttgagttgaattttgatgcattaatggctgtgtcggtaggttacattaattaccagccaattccgagattcccaggcatgtctcgtgacattgcattagaagtagatcaaaatattccagcagctgatttattatcaacgattcatgcacacggtggcaatatattaaaagatacacttgtctttgatgtatatcagggcgaacatttagaaaaaggtaaaaaatcaattgcaatacgtttaaattatttagacacagaagaaacattgacagatgagcgcgtttcaaaagtgcaagcggaaattgaagcagcattaattgaacaaggtgctgttattagataa

SEQ ID NO: 275 - DNA, 801 bp, Staphylococcus aureus
atgaataaaccaataggtgtaatagactctggtgtcggaggtttgacagtagctaaagaaattatgcgtcagttgccaaatgagacgatttattacttaggtgatattggacgatgtccatatgggccaagaccaggagaacaagtaaaacaatatacagttgaaatcgctcgtaaattaatggaatttgatataaaaatgctcgtgattgcttgtaatacagcaactgctgtagctttagaatatttacaaaagaccttatcaatcccagtgattggtgtaattgaaccaggtgctagaacagcaataatgactactagaaatcaaaatgtattagtactaggaactgaaggcacaattaaatctgaagcatatcgtacgcatattaaacgtatcaatccacatgtagaggtacatggcgttgcctgtccaggttttgtgccacttgtagaacaaatgagatatagtgatccaacaattacaagcattgtcattcatcaaacactgaaacgttggcgtaatagtgagtctgatactgtcattttaggatgtacccactatccattgctctataaacctatctatgattattttggtggtaaaaagacagtgatttcgtctggattagaaacggctcgtgaagttagtgcattgctaacatttagtaatgaacatgcaagttatactgaacatccagatcatcgattttttgcaacaggtgatcctactcacattactaacattatcaaagagtggttaaatttatctgtcaatgtggaacgtatatcagtgaatgactag

SEQ ID NO: 276 - DNA, 588 bp, Staphylococcus aureus
atgaaagagattgttattgcatcgaataatcaagggaaaataaatgactttaaagtaatatttccagattaccacgtaataggtatttcagaactaataccagattttgatgtggaagaaacaggatcaacatttgaagaaaatgctatattaaaatcagaagctgctgcaaaagcattgaataaaactgtcatagctgatgacagtggactagaagtttttgcattaaatggtgagccaggtatatactctgcacgttatgctggtgaaaataaaagcgatgaagcaaatattgaaaaattattaaataagcttggtaatacaactgatcgtcgtgcgcaatttgtttgtgtcataagtatgagtggccctgatatggaaacaaaagtatttaaaggtactgtttcaggtgaaattgcagatggaaaatatggcgaaaatggtttcggatatgatccgatattttatgtaccgaaattagataaaaccatggctcaactttcaaaagaacaaaaagggcaaattagtcatagacgaaatgcgattaatttacttcaagcttttcttgaaggtgaaaaaaatgtctaa

SEQ ID NO: 277 - DNA, 933 bp, Staphylococcus aureus
atggcgaaaatagtagtagcattaggtggtaatgctttaggaaaatcacctcaagaacaactcgagcttgttaaaaatactgcgaaatcattagtaggattaataacaaaaggacatgagattgttattagtcatggtaatggaccacaggttggaagcattaatttgggacttaactatgctgcagaacataaccaaggtccggcatttccatttgctgaatgtggcgcaatgagtcaagcttacatcggctatcaattacaagaaagcttacaaaatgaattgcattctattggaatggataaacaagtggtaacactagtgacacaagttgaagttgatgaaaatgatccggcatttaacaatccttcaaaaccaattgggttattttacaacaaagaagaagctgaacaaattcaaaaagaaaaaggatttatatttgttgaagatgctggaagaggatatagacgcgttgttccttcaccacaacccatctctattattgaattagagagtattaaaacacttattaaaaatgatacactcgttattgctgctggtggtggaggtataccagtaattagagagcaacatgatggttttaaaggtattgatgcagttatagacaaagataaaacaagtgcgttgttgggtgctaatattcaatgcgatcaattgattattttaacagcaattgattatgtatatattaattttaacactgaaaaccaacagcctttgaaaacaacaaatgttgatgaattaaaacgatatatagacgaaaatcaatttgcaaaaggaagtatgttaccaaaaattgaagcagccatatcatttattgaaaacaatccaaaaggaagtgtgcttataacatcattaaatgaattagatgctgccttagagggtaaagtaggtactgtgattaaaaagtaa

SEQ ID NO: 278 - DNA, 936 bp, Staphylococcus aureus
gtgtttcatcatatcagcgttatgttaaacgaaaccattgattatttaaatgtaaaagaaaatggtgtgtacattgactgtacgctaggtggagcgggacatgccctttatttactaaatcaattaaatgacgacggaagattaatagcaatcgatcaagaccaaactgcaattgataatgctaaagaggtattaaaggatcatttgcataaggtgacttttgttcatagcaacttccgtgaattaactcaaatattaaaagacttaaacattgaaaaagtagatggaatttattacgacttgggtgtttcaagcccacaactcgacattccagaacgaggattcagttatcaccatgacgcaacattagacatgcgtatggaccaaacacaagaactaacagcatatgaaattgttaacaattggtcatatgaagcgttagtgaagattttttatcgttatggcgaggagaaattttcaaaacagatagctcgaagaatcgaagcacatcgtgaacaacaaccaataacaacaacattagaattagttgacattataaaagaaggtattcctgcaaaagcaagaagaaaaggcggacatcctgcaaaacgagtatttcaagcactacgaattgcagtaaacgatgaattgtcagcttttgaagattcaatagaacaagcgattgaattagtgaaagtagacggcaggatttcggtaatcactttccattctttagaagatcgtttatgtaaacaggtgttccaagaatatgaaaaaggtccagaggtaccaagaggattgccagttataccagaagcatatacacctaagttaaagcgtgttaatcgtaaaccgattaccgctacagaagaagatttagatgacaataacagagcacgaagcgcgaaattacgtgtagctgaaatacttaaataa

SEQ ID NO: 279 - DNA, 402 bp, Staphylococcus aureus
atggctgtagaaaaagtgtaccaaccatatgacgaacaagtttataatagtataccgaagcaacaaccacaaactaagcccgaaaagaagactgtttcgagaaaagtggttgtacaattaactaaatttgaaaaagttttatacataactttgattactgtaattgctatgttaagtatttatatgctatctttaaaaatggatgcgtatgatacgcgaggaaagattgcagatttagattataaaatagataaacaatcaagtgaaaacagtgctttacaatctgaaatcaaaaagaattcttcttatgaacgcatatacgaaaaggctaagaaacaggggatgagccttgagaacgataatgtaaaggtagtgcgtagtaatggcgaagcaaaaaattaa

SEQ ID NO: 280 - DNA, 2235 bp, Staphylococcus aureus
atggcgaagcaaaaaattaaaattaaaaaaaataaaataggggcagtcctacttgttggtttattcggactgctcttttttatattggttttaagaatttcatatatcatgattactggacattctaatggtcaagatttagtcatgaaggcaaatgaaaagtatttagttaagaatgcacaacaaccagaacgaggaaagatatatgatcgtaatggtaaagtgctagcagaagatgtagaaagatataaacttgttgcagtaatagataaaaaggcgagtgccaattctaaaaaacctaggcatgtagttgataaaaaagagactgcaaagaaattatctacagtcattgatatgaagccagaggaaattgaaaagagacttagtcaaaagaaagctttccaaattgaatttggacgcaaaggaacaaatttaacgtatcaggacaaattgaaaatagagaaaatgaatttgcctggtatttctttattgcctgaaacagaacgcttttatccaaatggcaattttgcatcacacttaattggtagagctcagaaaaatccggatactggtgaacttaaaggtgcacttggagttgaaaagatttttgatagttatttaagtggatctaaaggatcattgagatatattcatgatatttggggatatatcgcaccaaatactaaaaaagagaagcagcctaaacgtggtgatgatgtccatttaacaatcgattcaaatattcaagtatttgttgaagaagctttagatggcatggttgaaagataccagccgaaagatttatttgcggttgtcatggatgccaaaactggagaaattttagcatacagtcagcgaccaacatttaatcctgaaactggtaaagactttggtaaaaagtgggcaaatgacctttatcaaaacacatacgagcctggatcaacatttaaatcatatgggttagcagctgctattcaagaaggtgcttttgatcctgataagaaatataaatctggacatagagatattatgggttcacgtatttcagactggaatagagtcggttggggtgaaatcccaatgtcactcggatttacttattcatctaatacattgatgatgcatttacaagatttagttggtgcagacaaaatgaaatcttggtatgaacgatttggatttggaaaatcaactaaaggtatgtttgatggagaagcacctggtcaaattggatggagtaatgagttgcaacaaaaaacgtcatcatttggtcaatcgacaacagtaacacctgttcaaatgttacaggcgcaatcagcgttctttaatgatggtaatatgttaaaaccatggtttgtgaatagcgttgaaaatcctgttagtaaaagacaattttataaaggtcaaaaacaaatcgcaggcaaaccaataacaaaagatactgctgaaaaagttgaaaagcaattggatttagttgtgaatagtaagaagagtcacgctgcaaactatcgtattgatggttatgaggtcgaaggtaagactggtacagcacaagtcgctgcacctaatggtggtggatacgttaaaggtccaaacccatattttgtaagttttatgggtgacgcaccgaagaaaaatcctaaagttattgtatacgctggtatgagcttggcacaaaaaaatgaccaagaagcttatgaattaggtgttagtaaagcgtttaaaccaataatggaaaatactttgaaatatttaaatgtaggtaaatcaaaagatgacacatctaatgcagagtatagtaaagtgccagatgttgaaggtcaagacaaacaaaaagctattgataatgtgagtgcaaaatcattagaaccagttactatcggttctggcacacaaataaaagcacaatctataaaagcagggaataaagtcttacctcatagtaaagtactgttattaacagacggagacttaactatgcctgacatgtcaggatggacgaaagaagatgtcattgcttttgaaaacctaacaaatattaaagtaaatttaaaaggtagcggttttgtgtcccaccaatcaattagtaagggacaaaaacttactgaaaaagataaaatagacgtagaattttcatcagagaatgtagacagcaattcgacgaataattctgattcaaattcagatgataagaagaaatctgacagtaaaactgacaaggataagtcggactaa

SEQ ID NO: 281 - DNA, 966 bp, Staphylococcus aureus
atgatttttgtatatgcgttattagcgctagtgattacatttgttttggtacctgttttaatacctacattaaaaaggatgaaatttggtcaaagtattcgagaagaaggtccacaaagccatatgaagaagactggtacaccaacgatgggtggactaacatttctattaagtattgtgataacgtctttggtggctattatatttgtagatcaagctaatccaatcatactgttattatttgtgacgattggttttgggttaattggttttatagatgattatattattgttgttaaaaagaataaccaaggtttaacaagtaaacagaagtttttggcgcaaattggtattgcgattattttctttgttttaagtaatgtgtttcatttggtgaatttttctacgagcatacatattccatttacgaatgtagcaatcccactatcatttgcatatgttattttcattgttttttggcaagtaggtttttctaatgcggtaaatttaacagatggtttagatggattagcaactggactgtcaattatcggatttacaatgtatgccatcatgagctttgtgttaggagaaacggcaattggtattttctgtatcattatgttgtttgcacttttaggatttttaccatataacattaaccctgctaaagtgtttatgggagatacaggtagcttagctttaggtggtatatttgctacgatttcaatcatgcttaatcaggaattatcattaatttttataggtttagtattcgtaattgaaacattatctgttatgttacaagtcgctagctttaaattgactggaaagcgtatatttaaaatgagtccgattcatcatcattttgaattgataggatggagcgaatggaaagtagttacagtattttgggctgttggtctgatttcaggtttaatcggtttatggattggagtgcattaa

SEQ ID NO: 282 - DNA, 1350 bp, Staphylococcus aureus
atgcttaattatacagggttagaaaataaaaatgtattagtcgtcggtttggcaaaaagtggttatgaagcagctaaattattaagtaaattaggtgcgaatgtgactgtcaatgatgggaaagacttatcgcaagatgctcatgcaaaagatttagaatctatgggtatttctgttgtaagtggaagtcatccattaacattgcttgataataatccaataattgttaaaaatcctggaataccttatacagtatctattattgatgaagcagtgaaacgaggtttgaaaattttaacagaagttgagttaagttatctaatctctgaagcaccaatcatagctgtaacgggtacaaatggtaaaacgacagttacttctctaattggagatatgtttaaaaaaagtcgcttaactggaagattatccggcaatattggttatgttgcatctaaagtagcacaagaagtaaagcctacagattatttagttacagagttgtcgtcattccagttacttggaattgaaaagtataaaccacacattgctataattactaacatttattcggcgcatctagattaccatgaaaatttagaaaactatcaaaatgctaaaaagcaaatatataaaaatcaaacggaagaagattatttgatttgtaattatcatcaaagacaagtgatagagtcggaagaattaaaagctaagacattgtatttctcaactcaacaagaagttgatggtatttatattaaagatggttttatcgtttataaaggtgttcgtattattaacactgaagatctagtattgcctggtgaacataatttagaaaatatattagcagctgtgcttgcttgtattttagctggtgtacctattaaagcaattattgatagtttaactacattttcaggaatagagcatagattgcaatatgttggtactaatagaactaataaatattataatgattccaaagcaacaaacacgctagcaacacagtttgccttaaattcatttaatcaaccaatcatttggttatgtggtggtttggatcgagggaatgaatttgacgaactcattccttatatggaaaatgttcgcgcgatggttgtattcggacaaacgaaagctaagtttgctaaactaggtaatagtcaagggaaatcggtcattgaagcgaacaatgtcgaagacgctgttgataaagtacaagatattatagaaccaaatgatgttgtattattgtcacctgcttgtgcgagttgggatcaatatagtacttttgaagagcgtggagagaaatttattgaaagattccgtgcccatttaccatcttattaa

SEQ ID NO: 283 - DNA, 1413 bp, Staphylococcus aureus
atggaagaacattactacgtaagtattgatattggatcatcaagcgtaaaaacaatagtaggcgagaaatttcacaatggtataaatgtgataggtacaggacaaacctacacgagcggtataaaaaatggtttaattgatgattttgatattgcgcgacaagcaatcaaagacacaattaaaaaggcatcaatcgcttcgggtgttgatattaaagaagttttcctgaaattacctatcattggaacggaagtttatgatgaatcaaatgaaatcgacttttatgaggatacagaaatcaacggttcacatatcgaaaaagtattagaaggtattagagaaaaaaatgatgtgcaagaaacagaagtaattaatgtgttcccgattcgttttatagtcgataaagaaaatgaggtttcagaccctaaagaattaattgccagacattcattaaaggttgaagcaggcgtaattgctattcaaaaatcgattttaattaatatgattaaatgcgtagaagcatgtggtgttgatgtattagatgtttactctgatgcatataactatggttcaatcctaacagctactgaaaaagagttaggtgcatgtgtcattgatattggtgaagacgttacgcaagttgctttttatgaacgcggtgaattagtagatgctgattctatcgaaatggcagggcgtgatattacagacgatattgcacaaggattaaacacttcttatgaaactgctgaaaaagttaaacaccaatatggtcatgcattctatgattctgcttcagatcaagatatcttcactgttgaacaggttgatagtgatgaaacagtacagtatactcaaaaagatttgagtgactttattgaagcgcgtgtagaagaaatattcttcgaagtatttgatgttttacaagatttaggattaacaaaagtaaatggtgggtttattgtaactggtggatctgcaaacttacttggcgtaaaagaattattatcagatatggtaagtgaaaaagttagaattcacacgccatcacaaatgggaattagaaaacctgaattttcttcagcaatttctacaatttctagtagtatcgcttttgatgagttattagattatgttacaattaattatcatgataatgaagaaactgaagaagatgttattgatgtgaaagacaaagataacgaatctaaattaggcggatttgattggtttaaacgtaaaacaaacaaaaaagatactcatgaaaatgaagtagagtcaacagatgaagaaatttatcaatcagaagataatcatcaggaacataaacagaatcatgaacatgttcaagacaaagataaagataaagaagaaagtaaattcaaaaaactaatgaaatctctatttgaatga

SEQ ID NO: 284 - DNA, 1173 bp, Staphylococcus aureus
atgttagaatttgaacaaggatttaatcatttagcgactttaaaggtcattggtgtaggtggtggcggtaacaacgccgtaaaccgaatgattgaccacggaatgaataatgttgaatttatcgctatcaacacagacggtcaagctttaaacttatctaaagctgaatctaaaatccaaatcggtgaaaaattaacacgtggtttaggagcaggagctaaccctgaaatcggtaaaaaagctgcagaggaatctcgtgaacaaattgaagatgcaatccaaggtgcagacatggtatttgttacttctggtatgggtggcggaactggtactggtgcagcaccagtcgttgctaaaattgcaaaagaaatgggcgcattaactgttggtgttgtaactcgtccatttagttttgaaggacgtaaacgtcaaactcaagctgctgctggagtagaagctatgaaagctgcagtagatacattaatcgttataccaaatgaccgtttattagatatcgttgacaaatctacgccaatgatggaagcatttaaagaagctgataacgtgttacgccaaggtgtacaaggtatctcagacttaatcgctgtttctggtgaagtaaacttagactttgcagacgttaagacaattatgtctaaccaaggttctgcattaatgggtattggtgtttcttctggtgaaaatagagcggtagaagctgctaaaaaagcaatctcttctccattacttgaaacatctatcgttggtgcacaaggtgtgcttatgaatattactggtggcgagtcattgtcattatttgaagcacaagaggctgctgatattgtccaagatgctgcagatgaagacgttaatatgattttcggtacagttattaatcctgaattacaagatgagattgttgtaacagttattgcaactggttttgatgacaaaccaacatcacatggtcgtaaatctggtagcactggattcggaacaagcgtaaatacttctagcaatgcaacttctaaagatgaatcattcacttcaaattcatcaaatgcacaagcaactgatagtgtaagtgaaagaacgcatacaactaaagaagatgatattccaagcttcattagaaatagagaagaaagacgttcaagaagaacaagacgttaa

SEQ ID NO: 285 - DNA, 624 bp, Staphylococcus aureus
atggataatgaaaaaggattgttaatcgttttatcaggaccatctggagtaggtaaaggtactgttagaaaacgaatatttgaagatccaagtacatcatataagtattctatttcaatgacaacacgtcaaatgcgtgaaggtgaagttgatggcgtagattacttttttaaaactagggatgcgtttgaagctttaattaaagatgaccaatttatagaatatgctgaatatgtaggcaactattatggtacaccagttcaatatgttaaagatacaatggacgaaggtcatgatgtatttttagaaattgaagtagaaggtgcaaagcaagttagaaagaaatttccagatgcgttatttattttcttagcacctccaagtttagatcacttgagagagcgattagtaggtagaggaacagaatccaatgagaaaatacaaagtcgtattaacgaagcgcgtaaagaagttgaaatgatgaatttatacgattacgttgtagttaatgatgaagtagaacttgcgaagaatagaattcaatgtattgtagaagctgagcacttaaaaagagagcgcgtagaagctaagtatagaaaaatgattttggaggctaaaaaataa

SEQ ID NO: 286 - DNA, 936 bp, Staphylococcus aureus
atgactaaaataatatttatgggtacaccagacttttcaacaactgttttagaaatgcttattgcagaacatgatgtcattgcagtcgtaacgcaaccagatcgacctgttggacgtaaacgtgttatgacaccaccaccagttaaaaaagttgcaatgaaatatgatttacctgtatatcagcctgaaaaattaagtggatcagaagaattagaacaattgcttcaattagatgtagatttaattgtaactgctgcttttggacaattattacctgaatcattgttggcattaccaaaacttggcgcaattaatgtacatgcatcattgttaccaaagtatagaggtggtgcaccaattcatcaggcaattatcgatggtgaacaagaaaccggcataacaattatgtatatggttaaaaaattagatgcgggtaatattatttcgcaacaagcaattaaaatagaagaaaatgataatgtcggtacgatgcatgataaattaagtgtattaggggcagatttattaaaagaaactttaccatctattatagagggcacaaatgaaagtgtacctcaagatgatacgcaagcaacatttgcttccaatattcgacgcgaagatgagcgaattagctggaataaaccaggaagacaagtgtttaatcaaattcgtggattatcaccatggccagttgcttatacaactatggatgacactaacttgaaaatatacgatgctgaactcgttgagactaataagataaacgagcctggaaccattatagaaacgactaaaaaagccattattgttgctacaaatgataatgaagctgttgcaattaaagatatgcaattagctgggaaaaagagaatgttagctgccaattatttaagtggtgcgcaaaacacactagtagggaagaaacttatatga

SEQ ID NO: 287 - DNA, 744 bp, Staphylococcus aureus
atgctagaggcacaattttttactgatactggacaacatagagataagaatgaagatgcgggtggtattttttataatcaaactaatcaacaacttttagttctgtgtgatggtatgggcggccataaagcaggagaagttgcaagtaaatttgttacagatgagttgaaatcccgttttgaagcggaaaatcttatagaagaacatcaagctgaaaattggttgcgtaataatataaaagatataaattttcagttatatcactatgcacaagaaaatgcagaatataaaggtatgggtacaacatgtgtttgtgcacttgtttttgaaaaatcagttgtgatagcaaatgtcggtgattctagagcctatgttattaatagtagacaaattgaacaaattactagtgatcactcatttgttaatcatcttgttttaacgggtcaaattacgccggaagaagcatttacacatccacaacgtaatattattacgaaggtgatgggcacagataaacgtgtgagtccagatttgtttattaagcgattaaatttttatgattatttattattaaattcagatggattaactgattatgttaaagacaatgaaattaagcgtttgttagtaaaagaaggtacaatagaagatcatggtgatcaattaatgcaattggcattagataaccattcgaaagataacgttactttcatactcgcggctattgaaggtgataaagtatga

SEQ ID NO: 288 - DNA, 642 bp, Staphylococcus aureus
atgcatataaatttattatgttctaatcgacacttgccgcaagatatttgggccaaaagtaatgaaggtaaatggggcggcgttgatagaggtgctttgattttattgaagcatcaaattatcccttttttctcagtgggagactttgattcagtcagtaaagaagaacgccaacttctaacagaacagttacaaatcaaaccagttcaagctgaaaaagctgatacggatttagctttagcggttgataaagctgttgcacttggatttgatagtattacaatttatggtgcaacaggcggacgattagatcacttttttggggcaattcagttattattgaaaaaagcatattataaacatgatgttcatatagaagttatcgatcaacaaaataaaattgaattattgcctaaaggtcaacatacagttgaaaaagataagagttatccgtacatttcatttataccgatgactgatgatgtagaactttctctagcaggttttaaatataatttagctagacaaatgcttaatataggttctactttaactatttcaaatgaaattgagtctttgcaagcgaaagtaactgtacatgatgggttgattttgcaaattagaagtacagatttaaattaa

SEQ ID NO: 289 - DNA, 927 bp, Staphylococcus aureus
atgagtaaaacagcaattatttttccgggacaaggtgcccaaaaagttggtatggcacaagatttgtttaataacaatgatcaagcaactgaaattttaacttcagcagcaaagacgttagactttgatattttagagacaatgtttactgatgaagaaggtaaattgggtgaaactgaaaacacgcaaccagctttattgacgcatagttcggcattattagcagcgctaaaaaatttgaatcctgattttactatggggcatagtttaggtgaatattcaagtttagttgcagctgacgtattatcatttgaagatgcagttaaaattgttagaaaacgtggtcaattaatggcgcaagcatttcctactggtgtaggaagcatggctgcagtattgggattagattttgataaagtcgatgaaatttgtaagtcattatcatctgatgacaaaataattgaaccagcaaacattaattgcccaggtcaaattgttgtttcaggtcacaaagctttaattgatgagctagtagaaaaaggtaaatcattaggtgcaaaacgtgtcatgcctttagcagtatctggaccattccattcatcgctaatgaaagtgattgaagaagatttttcaagttacattaatcaatttgaatggcgtgatgctaagtttcctgtagttcaaaatgtaaatgcgcaaggtgaaactgacaaagaagtaattaaatctaatatggtcaagcaattatattcaccagtacaattcattaactcaacagaatggctaatagaccaaggtgttgatcattttattgaaattggtcctggaaaagttttatctggcttaattaaaaaaataaatagagatgttaagttaacatcaattcaaactttagaagatgtgaaaggatggaatgaaaatgactaa

SEQ ID NO: 290 - DNA, 741 bp, Staphylococcus aureus
atgaaaatgactaagagtgctttagtaacaggtgcatcaagaggaattggacgtagtattgcgttacaattagcagaagaaggatataatgtagcagtaaactatgcaggcagcaaagagaaagctgaagcagtagtcgaagaaatcaaagctaaaggtgttgacagttttgcgattcaagcaaatgttgccgatgctgatgaagttaaagcaatgattaaagaagtagttagccaatttggttctttagatgttttagtaaataatgcaggtattactcgcgataatttattaatgcgtatgaaagaacaagagtgggatgatgttattgacacaaacttaaaaggtgtatttaactgtatccaaaaagcaacaccacaaatgttaagacaacgtagtggtgctatcatcaatttatcaagtgttgttggagcagtaggtaatccgggacaagcaaactatgttgcaacaaaagcaggtgttattggtttaactaaatctgcggcgcgtgaattagcatctcgtggtatcactgtaaatgcagttgcacctggttttattgtttctgatatgacagatgctttaagtgatgagcttaaagaacaaatgttgactcaaattccgttagcacgttttggtcaagacacagatattgctaatacagtagcgttcttagcatcagacaaagcaaaatatattacaggtcaaacaatccatgtaaatggtggaatgtacatgtaa

SEQ ID NO: 291 - DNA, 234 bp, Staphylococcus aureus; identical to SEQ ID NO: 56

SEQ ID NO: 292 - DNA, 732 bp, Staphylococcus aureus
atgtctaaacaaaagaaaagtgagatagttaatcgttttagaaagcgctttgatactaaaatgacagagttaggctttacttatcaaaatattgatttataccaacaagcattttcgcattcgagttttattaatgattttaatatgaatcgtttagaccataatgagcgtttagagtttttgggtgatgcggtattagaattgacggtttcacgatatttatttgataaacatcccaacttgccagaagggaatttaacaaaaatgcgtgccactattgtatgtgagccctcacttgtaatatttgcgaataaaattggattgaacgaaatgattttacttggtaaaggtgaagagaaaacagggggacgtacaagaccatcattaatatcagatgcattcgaagcatttattggggcattgtatttggatcaaggactagatatagtttggaaatttgctgagaaagttattttcccacatgtagaacaaaatgagttattaggcgtggtagattttaaaacacaattccaagaatatgtgcaccagcaaaataaaggtgatgtaacctataatttaataaaagaagagggaccggcacatcatcgtctattcacttcagaagttattctgcaaggggaagcaatagctgaaggtaaagggaaaacgaaaaaagaatcagaacaacgtgctgctaaaagtgcctataagcaattaaaacaaattaaatag

SEQ ID NO: 293 - DNA, 3567 bp, Staphylococcus aureus
atggtttatttaaaatcaatagatgccattggatttaagtcttttgcagatcaaaccaatgttcaattcgataaaggtgtaactgcaattgttggtccaaatggaagcggtaaaagtaatattacagatgctattaaatgggtgttgggtgaacaatcggctaaatcattacgtggctcaaaaatggaagatattatcttctcaggtgcagaacatcgcaaagctcaaaattatgctgaagtacagttaagattagataatcattctaaaaagctcagtgttgatgaaaacgaagttattgtaacaagaagattgtatcgaagtggtgaaagtgagtactacataaataatgaccgtgcaagattaaaagatattgccgatttatttttagattctggattgggaaaagaagcgtatagcattatctcgcaaggtagagttgatgaaatactaaatgctaaaccaattgatagacgtcaaattattgaagaatcggctggtgtacttaaatataaaaaacgtaaggctgaatcattaaataaacttgaccaaacagaagataatttaacgagagtagaagacattttatatgatttggaaggtcgcgtagaacctctaaaagaggaggcagctatagctaaagaatataagacactttcacatcaaatgaaacatagtgacattgtagttacagtgcacgatattgatcaatatacaaatgacaatagacaattagatcaacgtttaaatgatttacaaggtcaacaagcaaataaagaagctgacaagcaacgtttaagccaacaaattcaacaatataaaggtaaacgacatcaacttgataacgatgttgaatcgcttaattatcaattagtaaaagctacggaagcctttgaaaaatatacgggacaattaaatgttttagaagaacgtaagaaaaatcaatctgaaacaaatgcacgatatgaagaagaacaagaaaatttaatggagcttttagaaaatatatcaaatgagatttctgaagctcaagatacttataagtctctgaaaagtaaacaaaaagaactcaatgctgtcattcgtgaacttgaagaacaactatatgtttcagacgaagcacatgatgaaaaattggaagaaattaaaaacgaatactatacattaatgtcagagcaatcagatgttaacaatgatattcgttttttaaagcatactatagaagagaatgaggctaaaaaatcaagactagattctcgattagttgaagtttttgagcaattgaaagatattcagggtcaaataaaaacgacaaaaaaagaatatcaacagaccaacaaagaactttctgctgtagataaagaaattaaaaatatagaaaaagatctcactgatacaaaaaaagcacaaaatgaatacgaagagaaattgtatcaagcatatcgatataccgaaaaaatgaaaacacgtattgatagtttggcaacgcaagaggaagaatacacttattttttcaatggcgtcaaacatattttgaaagctaaaaataaagaattaaagggtattcatggtgcagttgcggaaattattgatgtgccatctaaattaactcaggcaattgaaacagcattaggtgcttcattacaacatgtcattgtagattcagaaaaagatggacgccaggctattcaatttttaaaagaacgtaatttaggtcgtgcgacgtttttaccattaaatgttatacagagtagagtggtagcgactgatattaaatctattgctaaagaggcaaacggatttattagtattgcttcggaagcagtgaaagtagcaccagaatatcaaaatattatcgggaatttattaggtaatacgattatcgttgatcatttaaagcatgcaaatgaattggcacgtgcgattaaatatcgaactcgtattgttactttggaaggtgatattgtaaaccctggtggttctatgactggtggtggcgctcgtaagtccaaaagtattctgtctcaaaaagacgagttgacaacaatgagacaccaattagaagattacttgcgtcaaacagaatcatttgaacaacaatttaaagagttgaagataaaaagtgatcaattaagtgaactgtattttgaaaaaagtcaaaagcataatacacttaaagagcaagtgcatcattttgaaatggagctcgatagattaactacacaagaaacacaaataaaaaatgatcatgaagaattcgaatttgaaaaaaatgatggttatacgagtgacaaaagtcgacaaactttgagtgaaaaagaaactcatttagaaagtattaaagcatctttaaaacgactagaagatgaaattgaacgctacacaaaactttctaaagaaggtaaggaaagcgtaactaaaacacaacaaacgttacatcagaaacaatctgatcttgctgtggttaaagagcgtattaaaacacaacaacagacaatagatcgattaaataatcaaagtcaacaaactaaacatcaattaaaagatgttaaagaaaaaattgcattctttaattcggatgaagtgatgggcgaacaagcttttcaaaatattaaagatcaaattaatggtcaacaagaaacgagaacacgcttatctgatgaattagataaattgaaacaacaacgtattgagttgaatgaacaaatcgatgcgcaggaagctacactacaagtttgtcaccaagatattttagctatcgaaaatcactaccaagatattaaagctgaacaatcaaagttagatgtattaattcatcatgcgatagatcatttaaatgatgaatatcaattgactgttgaacgtgcgaaatctgaatatacgagtgatgaatcgattgacgcattacgtaaaaaagttaagttaatgaagatgtcgattgatgaactaggtcctgtaaacttaaatgcaattgaacaatttgaagagttaaatgaacgttatacatttttaagtgaacaacgtacagatcttcgtaaagctaaagaaacattagagcaaattataagtgaaatggatcaagaggttactgaaagatttaaagaaactttccatgctattcaaggacattttacagctgtgttcaaacaattgtttggtggaggcgatgcagaattgcaattaactgaagccgattatttaacagctggtattgatattgtggtacaaccaccgggtaaaaagttgcaacatttatcgttactgagtggtggtgagcgtgcattaactgctattgctttactatttgcaattttaaaagtaagatctgcaccttttgttatattagatgaggttgaagctgcactagatgaagcaaatgttattagatacgcaaaatatttaaatgagttatcagacgaaacacaattcattgttattacacaccgtaaaggaacaatggaatttgcagataggttatacggtgtaacaatgcaagaatcaggtgttactaaacttgtgagtgtgaatttaaatacaatagatgatgtgttgaaggaggagcaataa

SEQ ID NO: 294 - DNA, 1251 bp, Staphylococcus aureus
atgagcttttttaaacgcttaaaagataagtttgcaacaaataaagaaaatgaagaagttaaatccttaagagaagaacaaggtcaagacaaattagaagatacacattctgaaggttcaacgcaggacgtaaatgatttagcagaaaatgctgaagtgaaaaagaagccacgcaagttgagtgaagcggattttgatgacgatggcttaatatcaattgaagattttgaagaaattgaagctcaaaaaatgggtgctaaatttaaagcaggactcgaaaaatctcgtcaaaatttccaagaacaattaaataatttgatagcgagatatcgtaaagtagatgaagacttttttgaagctttagaagaaatgttaatcactgcagacgtcggttttaatacagtgatgacgttaactgaagaattacgtatggaagcacaacgacgtaatattcaagatactgaagatttgcgtgaagtcattgttgaaaaaatcgtagagatttaccatcaagaagatgataattcagaagctatgaacatagaagatggtcgtttaaatgtcattttaatggtcggtgtgaatggtgttggtaaaacaacaacaattggaaaattagcttaccgatataaaatggaaggtaaaaaagtaatgttagctgcgggcgatacttttagagcgggtgctattgatcaattgaaagtttggggcgaacgtgttggtgtagatgtaattagccaaagtgaaggttctgatccagctgctgttatgtatgatgcgattaatgccgctaaaaacaaaggtgttgatattttaatctgtgataccgctggacgtttacaaaataaaacaaatctaatgcaagaattagaaaaagttaagcgtgtaattaatcgagcagtgccagatgcgcctcatgaagcattactatgtttagatgctacaactggtcagaatgcgttgtcacaagctagaaactttaaagaagtaacaaatgttacaggtattgtattaacgaaattagatggtacagccaaaggtggtatcgtattagccattcgtaatgaattgcacattccagttaaatatgtaggtttaggtgagcaattagatgacttacaaccatttaaccctgaaagttatgtctacggcttattcgctgatatgattgaacaaaatgacgaaataacaacagttgaaaatgatcaaattgtaacagaagaaaaggacgataatcatggggcaaaatga

SEQ ID NO: 295 - DNA, 276 bp, Staphylococcus aureus
atggcagttaaaattcgtttaacacgtttaggttcaaaaagaaatccattctatcgtatcgtagtagcagatgctcgttctccacgtgacggacgtatcatcgaacaaatcggtacttataacccaacgagcgctaatgctccagaaattaaagttgacgaagcgttagctttaaaatggttaaatgatggtgcgaaaccaactgatacagttcacaatatcttatcaaaagaaggtattatgaaaaaatttgacgaacaaaagaaagctaagtaa

SEQ ID NO: 296 - DNA, 738 bp, Staphylococcus aureus
atgaaaattgattatttaactttatttcctgaaatgtttgatggtgttttaaatcattcaattatgaaacgtgcccaagaaaacaataaattacaaatcaatacggttaattttagagattatgcaattaacaagcacaaccaagtagatgattatccgtatggtggcggacaaggtatggtgttaaagcctgaacctgtttttaatgcgatggaagacttagatgtcacagaacaaacacgcgttattttaatgtgtccacaaggcgagccattttcacatcagaaagctgttgaattaagcaaggctgaccacatcgttttcatatgcggacattatgaaggttacgatgaacgtatccgaacacatcttgtcacagatgaaatatcaatgggtgactatgtgttaactggcggtgagttaccggcaatgacaatgactgatgctattgttagactgattccaggtgttttaggtaatgaacagtcacatcaagacgattcattttcagatgggttattagagtttccgcaatatacacgtccgcgtgaatttaagggtctaacagttccagatgttttattgtctggaaatcatgccaatattgatgcatggagacatgagcaaaagttgatccgcacatataataaaagacctgacttaattgaaaaatatccattaactaatgaagataagcaaatattagaaagatataaaataggattgaaaaaaggttag

SEQ ID NO: 297 - DNA, 351 bp, Staphylococcus aureus
atgacaaatcacaaattaatcgaagcagtaactaaatcacaattgcgtacagacttaccaagtttccgtcctggtgatactttacgtgtacacgtacgtatcattgagggtactcgtgagcgtatccaagtattcgaaggcattgtaattaaacgtcgtggcggtggcgtttctgaaacgtttacagttcgtaaaatttcatcaggtgttggcgtggaacgtacattcccattacacacaccaaaaattgaaaaaatcgaagttaaacgtcgtggtaaagtacgtcgtgctaaattatattacttacgtagtttacgtggtaaagctgctagaatccaagaaattcgttaa

SEQ ID NO: 298 - DNA, 885 bp, Staphylococcus aureus
atggttattcaatggtatccaggacatatggcgaaagccaaaagagaagtaagtgaacaattaaaaaaagtagatgtagtgtttgaactagtagatgcaagaattccatatagttcaagaaaccctatgatagatgaagttattaaccaaaaaccacgtgttgttatattaaataaaaaagatatgtctaatttaaatgagatgtcaaaatgggaacaattttttattgataaaggatactatcctgtatcagtggatgctaagcacggtaaaaatttaaagaaagtggaagctgcagcaattaaggcgactgctgaaaaatttgaacgcgaaaaagcgaaaggacttaaacctagagcgataagagcaatgatcgttggaattccaaatgttggtaaatccacattaataaataaactggcaaagcgtagtattgcgcagactggtaataaaccaggtgtgaccaaacaacaacaatggattaaagttagtaatgcattacaactattagacacaccagggatactttggcctaaatttgaagatgaagaagtcggtaagaagttgagtttaactggtgcgataaaagatagtattgtgcacttagatgaagttgccatctatggattaaactttttaattcaaaatgatttagcgcgattaaagtcacattataatattgaagttcctgaagatgcagaaatcatagcgtggtttgatgcgatagggaaaaaacgtggcttaattcgacgtggtaatgaaattgattacgaagcagtcattgaactgattatttatgatattcgaaatgctaaaataggaaattattgttttgatatttttaaagatatgactgaggaattagcaaatgacgctaacaattaa

SEQ ID NO: 299 - DNA, 897 bp, Staphylococcus aureus
ttgaatcatattcaagaagcgtttttaaatacattgaaagttgaacggaatttttcggaacatacattgaaatcatatcaagatgacttaattcagtttaatcaatttttagaacaagaacatttacagttgaaaacttttgaatacagagatgctagaaattatttgagctatttatattcaaatcatttgaaaagaacatctgtttctcgtaaaatctcaacgttaagaactttctatgaatattggatgacgcttgatgagaacattattaatccatttgttcaattagtacatccgaaaaaagaaaaatatcttccgcaattcttttacgaagaagaaatggaagcgttattcaaaactgtagaagaggacacttcaaaaaatttacgggatcgagttattcttgaattgttgtatgctacaggcatccgtgtttcggaattagtaaatattaaaaaacaagatatagatttttacgcgaatggtgttaccgtattaggaaaagggagcaaagagcgttttgtaccgtttggtgcttattgtagacaaagcatcgaaaattatttagaacatttcaaaccaattcagtcatgcaatcatgattttcttattttaaatatgaagggtgaagcaatcactgaacgcggtgtacgatatgttttaaatgatattgttaaacgaacagcaggcgtaagtgagattcatccccacaagctcagacatacatttgcaacgcatttattgaatcaaggtgcagacctaagaacagtacaatcgttattaggtcatgttaatttgtcaacaactggtaaatatacacacgtatctaaccaacaattaagaaaagtgtatctaaatgcacatcctcgagcgaaaaaggagaatgaaacatga

SEQ ID NO: 300 - DNA, 768 bp, Staphylococcus aureus
atggcagtaatttcaatgaaacaattactagaagcgggtgttcacttcggtcaccaaacacgtcgttggaacccaaaaatgaaaaaatatatcttcactgagagaaatggtatttatatcatcgacttacaaaaaacagtgaaaaaagtagacgaggcatacaacttcttgaaacaagtttcagaagatggtggacaagtcttattcgtaggaactaaaaaacaagcacaagaatcagttaaatctgaagcagaacgtgctggtcaattctacattaaccaaagatggttaggtggattattaactaactataaaacaatctcaaaacgaatcaaacgtatttctgaaattgaaaaaatggaagaagatggtttattcgaagtattacctaaaaaagaagtagtagaacttaaaaaagaatacgaccgtttaatcaaattcttaggcggaattcgtgatatgaaatcaatgcctcaagcattattcgtagttgacccacgtaaagagcgtaatgcaattgctgaagctcgtaaattaaatattcctatcgtaggtatcgttgacactaactgtgatcctgacgaaattgactacgttatcccagcaaacgacgatgctatccgtgcggttaaattattaactgctaaaatggcagatgcaatcttagaaggtcaacaaggcgtttctaatgaagaagtagctgcagaacaaaacatcgatttagatgaaaaagaaaaatcagaagaaacagaagcaactgaagaataa

SEQ ID NO: 301 - DNA, 882 bp, Staphylococcus aureus
atggcaactatttcagcaaaacttgttaaagaattacgtaaaaaaactggcgcgggtatgatggattgtaaaaaagcgctaactgaaactgatggtgacatcgataaagcgattgattacctacgtgaaaaaggtattgctaaagcagctaaaaaagcagaccgtattgcggctgaaggtttagtacatgtagaaactaaaggtaacgacgcagttatcgttgaaatcaactctgaaacagactttgttgctcgtaacgaaggattccaagagttagttaaagaaatcgctaatcaagtattagatacaaaagctgaaactgttgaagctttaatggaaacaactttaccaaatggtaaatcagttgatgaaagaattaaagaagcaatttcaacaatcggtgaaaaattaagtgttcgtcgttttgctatcagaactaaaactgataacgatgctttcggcgcttacttacacatgggtggacgcattggtgtattaacagttgttgaaggttcaactgacgaagaagcagcaagagacgttgctatgcatatcgctgcaatcaaccctaaatatgtttcttctgaacaagttagcgaagaagaaatcaaccacgaaagagaagttttaaaacaacaagcattaaatgaaggtaaaccagaaaacatcgttgaaaaaatggtggaaggacgtttacgtaaatacttacaagaaatttgtgctgtagatcaagacttcgttaaaaaccctgatgtaacagttgaagctttcttaaaaacaaaaggtggaaaacttgttgacttcgtacgctatgaagtaggcgaaggtatggaaaaacgcgaagaaaactttgcggatgaagttaaaggacaaatgaaataa

SEQ ID NO: 302 - DNA, 723 bp, Staphylococcus aureus
atggctcaaatttctaaatataaacgtgtagttttgaaactaagtggtgaagcgttagctggagaaaaaggatttggcataaatccagtaattattaaaagtgttgctgagcaagtggctgaagttgctaaaatggactgtgaaatcgcagtaatcgttggtggcggaaacatttggagaggtaaaacaggtagtgacttaggtatggaccgtggaactgctgattacatgggtatgcttgcaactgtaatgaatgccttagcattacaagatagtttagaacaattggattgtgatacacgagtattaacatctattgaaatgaagcaagtggctgaaccttatattcgtcgtcgtgcaattagacacttagaaaagaaacgcgtagttatttttgctgcaggtattggaaacccatacttctctacagatactacagcggcattacgtgctgcagaagttgaagcagatgttattttaatgggcaaaaataatgtagatggtgtatattctgcagatcctaaagtaaacaaagatgcggtaaaatatgaacatttaacgcatattcaaatgcttcaagaaggtttacaagtaatggattcaacagcatcctcattctgtatggataataacattccgttaactgttttctctattatggaagaagggaatattaaacgtgctgttatgggtgaaaagataggtacgttaattacaaaataa

SEQ ID NO: 303 - DNA, 555 bp, Staphylococcus aureus
atgagtgacattattaatgaaactaaatcaagaatgcaaaaatcaatcgaaagcttatcacgtgaattagctaatatcagtgcaggaagagctaattcaaatttattaaacggcgtaacagttgattactatggtgcaccaacacctgtacaacaattagcaagcatcaatgttccagaagcacgtttacttgttatttctccatacgacaaaacttctgtagctgacatcgaaaaagcgataatagcggctaacttaggtgtcaacccaacaagtgatggtgaagtgatacgtattgcagtacctgccttaacagaagagcgtagaaaagagcgcgttaaagatgttaagaaaattggtgaagaagctaaagtatctgttcgaaatattcgtcgtgatatgaatgatcagttgaaaaaagatgaaaaaaatggcgacattactgaagatgagttgagaagtggtactgaagatgttcagaaagcaacagacaattcaataaaagaaattgatcaaatgattgctgataaagaaaaagatattatgtcagtataa

SEQ ID NO: 304 - DNA, 771 bp, Staphylococcus aureus
atgtttaaaaagctaataaataaaaagaacactataaataattataatgaagaattagactcgtctaatatacctgaacatatcgctattattatggatggtaatgggcgatgggctaagaagcgaaaaatgcctagaattaaaggccattacgaaggtatgcaaacaataaaaaaaattactaggatagctagtgatattggtgttaagtacttaactttatatgccttttccactgaaaattggtcaagacctgaaagtgaagtaaattatattatgaatttgcctgtcaatttcttaaagacattcttaccggaactaattgaaaaaaatgtcaaagttgaaacaattggatttactgataagttgccaaaatcaacgatagaagcaattaataatgctaaagaaaagacagctaataataccggcttaaaattaatatttgcaattaattatggtggcagagcagaacttgttcatagtattaaaaatatgtttgacgagcttcatcaacaaggtttaaatagtgatatcatagatgaaacatatataaacaatcatttaatgacaaaagactatcctgatccagagttgttaattcgtacttcaggagaacaaagaataagtaatttcttgatttggcaagtttcgtatagtgaatttatctttaatcaaaaattatggcctgactttgacgaagatgaattaattaaatgtataaaaatttatcagtcacgtcaaagacgctttggcggattgagtgaggagtag

SEQ ID NO: 305 - DNA, 1704 bp, Staphylococcus aureus
atgaagcaatccaaagtttttataccaacgatgcgtgatgtgccatcagaagcagaagcacaaagtcatcgtttattattgaaatcgggtttgataaaacaaagtacaagtgggatttatagttatttaccgctagcaacacgtgtgttaaataatattactgcaattgtgcgacaagaaatggaacgtatcgattctgttgaaattttaatgccagcgttacaacaagctgaattatgggaagaatcaggacgttggggtgcatatggcccagaattaatgcgtttacaagatagacatggaagacaatttgcattaggtccaacacatgaagaattagttacatcaatagtaagaaatgaattgaaatcatacaaacaattaccgatgacattattccaaattcaatctaaattccgtgatgaaaagagaccacgttttggtttacttcgtgggcgtgaatttattatgaaagatgcgtattcattccatgctgacgaggcatcattagatcaaacgtatcaagatatgtatcaagcgtatagccgtatttttgagagagttggcattaatgctagaccagttgtagcagattcaggtgctataggcggtagccatacacatgaatttatggcattaagtgctatcggtgaggatacaatcgtttacagtaaagaaagtgactatgctgctaatatcgaaaaagcagaagtcgtttacgaaccaaatcataagcattctactgtgcaacctttagaaaaaattgaaacaccaaatgttaagactgcacaagaattggcagacttcttaggtagaccagtagatgaaatcgttaaaacgatgattttcaaagttgatggcgaatatattatggttttagtgcgtggccatcatgaaattaatgacattaaattaaaatcttatttcggcacagataatattgaattagcaacacaagacgaaattgttaatttagttggtgcaaatccgggttcactaggtcctgttattgataaagaaatcaaaatttatgcagataattttgtgcaagatttaaataatttagttgtcggtgctaacgaagatggctatcacttaattaatgtaaatgtaggtagagacttcaacgttgatgaatatggcgatttccgttttattttagaaggcgaaaagttaagtgatggttcaggcgttgcacattttgctgaaggtattgaagttggtcaagtattcaaattgggtactaagtattcagaatcaatgaatgctacattcttagataaccaaggaaaagctcaacctttaattatgggctgttacggtattggaatttctagaacgctaagtgcgattgttgaacaaaatcacgatgataatggaattgtttggcctaaatcagttactccatttgatttacatttaatttctattaatcctaagaaagatgatcaacgagagctagcagatgcactatatgctgaatttaatactaaatttgatgtgttgtacgatgatcgtcaggaacgtgcaggtgtcaaatttaatgatgccgatttaattggtttaccactgcgaattgttgttggtaaacgtgcatcggaaggtattgtagaagttaaagaacgtttaacaggtgatagcgaagaagttcacattgatgacttaatgactgtcattacaaataaatatgataacttaaaataa

SEQ ID NO: 306 - DNA, 4317 bp, Staphylococcus aureus
ttggcaatgacagagcaacaaaaatttaaagtgcttgctgatcaaattaaaatttcaaatcaattagatgctgaaattttaaattcaggtgaactgacacgtatagatgtttctaacaaaaacagaacatgggaatttcatattacattaccacaattcttagctcatgaagattatttattatttataaatgcaatagagcaagagtttaaagatatcgccaacgttacatgtcgttttacggtaacaaatggcacgaatcaagatgaacatgcaattaaatactttgggcactgtattgaccaaacagctttatctccaaaagttaaaggtcaattgaaacagaaaaagcttattatgtctggaaaagtattaaaagtaatggtatcaaatgacattgaacgtaatcattttgataaggcatgtaatggaagtcttatcaaagcgtttagaaattgtggttttgatatcgataaaatcatattcgaaacaaatgataatgatcaagaacaaaacttagcttctttagaagcacatattcaagaagaagacgaacaaagtgcacgattggcaacagagaaacttgaaaaaatgaaagctgaaaaagcgaaacaacaagataacaacgaaagtgctgtcgataagtgtcaaattggtaagccgattcaaattgaaaatattaaaccaattgaatctattattgaggaagagtttaaagttgcaatagagggtgtcatttttgatataaacttaaaagaacttaaaagtggtcgtcatatcgtagaaattaaagtgactgactatacggactcattagttttaaaaatgtttactcgtaaaaacaaagatgatttagaacattttaaagcgctaagtgtaggtaaatgggttagggctcaaggtcgtattgaagaagatacatttattagagatttagttatgatgatgtctgatattgaagagattaaaaaagcgacaaaaaaagataaggctgaagaaaagcgtgtagaattccacttgcatactgcaatgagccaaatggatggtatacccaatattggtgcgtatgttaaacaggcagcagactggggacatccagccattgcggttacagaccataatgttgtgcaagcatttccagatgctcacgcagcagcggaaaaacatggcattaaaatgatatacggtatggaaggtatgttagttgatgatggtgttccgattgcatacaaaccacaagatgtcgtattaaaagatgctacttatgttgtgttcgacgttgagacaactggtttatcaaatcagtatgataaaatcatcgagcttgcagctgtgaaagttcataacggtgaaatcatcgataagtttgaaaggtttagtaatccgcatgaacgattatcggaaacgattatcaatttgacgcatattactgatgatatgttagtagatgcccctgagattgaagaagtacttacagagtttaaagaatgggttggcgatgcgatattcgtagcgcataatgcttcgtttgatatgggctttatcgatacgggatatgaacgtcttgggtttggaccatcaacgaatggtgttatcgatactttagaattatctcgtacgattaatactgaatatggtaaacatggtttgaatttcttagctaaaaaatatggcgtagaattaacgcaacatcaccgtgccatttatgatacagaagcaacagcttacattttcataaaaatggttcaacaaatgaaagaattaggtgtattaaatcataacgaaatcaacaaaaaactcagtaatgaagatgcatataaacgtgcaagacctagccatgtcacattaattgtacaaaaccaacaaggtcttaaaaatctatttaaaattgtaagtgcatcattggtgaagtatttctaccgtacacctcgaattccacgttcattgttagatgaatatcgtgagggattattggtaggtacagcgtgtgatgaaggtgaattatttacggcagttatgcagaaggaccagagccaagttgaaaaaattgccaaatattatgattttattgaaattcaaccaccggcactttatcaagatttaattgatagagagcttattagagatactgaaacattacatgaaatttatcaacgtttaatacatgcaggtgacacagcgggtatacctgttattgcgacaggaaatgcacactatttgtttgaacatgatggtatcgcacgtaaaattttaatagcatcacaacccggcaatccacttaatcgctcaactttaccggaagcacattttagaactacagatgaaatgttaaacgagtttcattttttaggtgaagaaaaagcgcatgaaattgttgtgaaaaatacaaacgaattagcagatcgaattgaacgtgttgttcctattaaagatgaattatacacaccgcgtatggaaggtgctaacgaagaaattagagaactaagttatacaaatgcgcgtaaactgtatggtgaagacctgcctcaaatcgtaattgatcgattagaaaaagaattaaaaagtattatcggtaatggatttgcggtaatttacttaatttcgcaacgtttagttaaaaaatcattagatgatggatacttagttggttcccgtggttcagtaggttctagttttgtagcgacaatgactgagattactgaagtaaacccgttaccgccacactatatttgtccgaactgtaaaacgagtgaatttttcaatgatggttcagtaggatcaggattcgatttacctgataagacgtgtgaaacttgtggagcgccacttattaaagaaggacaagatattccgtttgaaacatttttaggatttaagggagataaagttcctgatatcgacttaaactttagtggtgaatatcaaccgaatgcccataactacacaaaagtattatttggtgaggataaagtattccgtgcaggtacaattggtaccgttgctgaaaagactgcttttggttatgttaaaggttatttgaatgatcaaggcatccacaaaagaggcgctgaaatagatcgactcgttaaaggatgtacaggtgttaaacgtacaactggacagcatccaggaggtattattgtagtacctgattacatggatatttatgattttacgccgatacaatatcctgccgatgatcaaaattcagcatggatgacgacacattttgatttccattctattcatgataatgtattaaaacttgatatacttggacacgatgatccaacaatgattcgtatgcttcaagatttatcgggcattgatccaaaaacgatacctgtagatgacaaagaagtcatgcaaatatttagtacacctgaaagtttaggtgttactgaagatgaaattttatgtaaaacaggtacgtttggggttccagaattcggtacagggttcgtgcgtcaaatgttagaagatacaaagccaacaacattttctgaattagttcaaatctcaggattatctcatggtacagatgtgtggttaggcaatgctcaagaattaattaaaaccggtatatgtgatttatcaagtgtaattggttgtcgtgatgatatcatggtttatttaatgtatgctggtttagaaccatcaatggcttttaaaataatggagtcagtacgtaaaggtaaaggtttaactgaagaaatgattgaaacgatgaaagaaaatgaagtgccggattggtatttagattcatgtcttaaaattaagtacatgttccctaaagcccatgcagcagcatacgttttaatggcagtacgtatcgcatatttcaaagtacatcatccactttattactatgcatcttactttacaattcgtgcgtcagattttgatttaatcacgatgattaaagataaaacaagcattcgaaatactgtaaaagacatgtattctcgctatatggatctaggtaaaaaagaaaaagacgtattaacagtcttggaaattatgaatgaaatggcgcatcgaggttatcgaatgcaaccgattagtttagaaaagagtcaggcgttcgaatttatcattgaaggcgatacacttattccgccgttcatatcagtgcctgggcttggcgaaaacgttgcgaaacgaattgttgaagctcgtgacgatggcccatttttatcaaaagaagatttaaacaaaaaagctggattatctcagaaaattattgagtatttagatgagttaggctcattaccgaatttaccagataaagctcaactttcgatatttgatatgtaa

SEQ ID NO: 307 - DNA, 1176 bp, Staphylococcus aureus
gtgtcaagtaatgaattattattagctactgagtatttagaaaaagaaaagaagattcctagagcagtattaattgatgctattgaagcagctttaattactgcatacaaaaagaattatgatagtgcaagaaatgtccgtgtggaattaaatatggatcaaggtactttcaaagttatcgctcgtaaagatgttgttgaagaagtatttgacgacagagatgaagtggatttaagtacagcgcttgttaaaaaccctgcatatgaaattggtgatatatacgaagaagatgtaacacctaaagattttggtcgtgtaggtgctcaagcagcgaaacaagcagtaatgcaacgtcttcgtgatgctgaacgtgaaattttatttgaagaatttatagacaaagaagaagacatacttactggaattattgaccgtgttgaccatcgttatgtatatgtgaatttaggtcgtatcgaagctgttttatctgaagcagaaagaagtcctaacgaaaaatatattcctaacgaacgtatcaaagtatatgttaacaaagtggaacaaacgacaaaaggtcctcaaatctatgtttctcgtagccatccaggtttattaaaacgtttatttgaacaagaagttccagaaatttacgatggtactgtaattgttaaatcagtagcacgtgaagctggcgatcgctctaaaattagtgtcttctctgaaaacaatgatatagatgctgttggtgcatgtgttggtgctaaaggcgcacgtgttgaagctgttgttgaagagctaggtggcgaaaaaatcgacatcgttcaatggaatgaagatccaaaagtatttgtaaaaaatgctttaagcccttctcaagttttagaagttattgttgatgaaacaaatcaatctacagtagttgttgttcctgattatcaattgtcattagcgattggtaaaagaggacaaaacgcacgtctagctgctaaattaaccggctggaaaattgatattaaatcagaaacagatgcgcgtgaagcgggtatctatccagtagttgaagctgaaaaagtaactgaagaagatattgctttagaagatgctgacacaacagaatcaaccgaagaggtaaatgatgtttcagttgaaacaaatgtagagaaagaatctgaataa

SEQ ID NO: 308 - DNA, 285 bp, Staphylococcus aureus
atgaaaaagaaaaaaattccgatgcgaaaatgtattctttcaaatgaaatgcatcccaaaaaagatatgattcgtgttgttgttaataaagaaggcgaaatctttgcggatgttactggaaagaaacaaggccgtggcgcatatgtttctaaagatgttgctatggttgaaaaagcacaacaaaaagaaattttagaaaaatattttaaagcatctaaagagcaattggatcctgtttacaaagaaattattagattaatttatagagaagagattccaaaatga

SEQ ID NO: 309 - DNA, 2118 bp, Staphylococcus aureus
atgagtaaacaaagaatttacgaatatgcgaaagaattaaatctaaagagtaaagagattatagatgagttaaaaagcatgaatatagaggtttcaaatcatatgcaagctttggaagatgaccaaattaaagcattagataaaaagttcaaaaaagaacaaaagaacgacaataaacaaagcactcaaaataatcaccaaaaatcaaacaatcaaaaccaaaataaagggcaacaaaaagataacaaaaagaatcaacaacaaaataataaaggcaacaaaggcaataaaaagaataatagaaataataagaaaaataacaagaataataaaccacaaaatcaaccagctgctccaaaagaaataccatcaaaagtgacatatcaagaaggtattacagtaggcgaatttgcggataaattaaatgttgaatcatcagaaattatcaaaaaattattcttacttggtattgttgctaatatcaatcaatcattaaatcaagaaacaatcgaattaattgccgatgattatggcgttgaggttgaagaagaagttgtgattaatgaagaagatttatcaatctacttcgaagacgaaaaagatgatccagaagcaattgagagaccagcagttgtaacaattatgggacatgttgaccatggtaaaacgactttattagattcaattcgtcatacaaaagttacagcaggtgaagcaggcggaatcactcaacatattggtgcatatcaaattgaaaacgatggcaaaaaaatcactttcttagatacaccgggacatgctgcatttacaacgatgcgtgcgcgtggtgcacaagtaacagatattacaattttagtagtagcagctgacgatggtgttatgccacaaacaattgaagcaattaaccatgctaaagaagcagaagtaccaattattgttgcagtaaataaaattgataaaccaacttcaaatcctgatcgagttatgcaagaattaactgaatatggtttaattcctgaagattggggcggcgaaacaattttcgttccactttctgcattaagtggtgatggtatcgacgatttattagaaatgataggattagttgcagaagttcaagaacttaaagcaaatcctaaaaaccgtgctgttggtacagttatcgaagctgaattagataaatcacgtggtccttctgcatcattattagtacaaaacggtacattaaatgttggtgatgcgattgtagttggtaatacttacggccgtatccgtgcaatggttaatgacttaggtcaaagaatcaaaacggctggtccatcaacgcctgttgaaattacaggtattaatgatgtgccacaagctggggatcgctttgttgtatttagtgatgaaaaacaagctcgtcgtattggtgaatcaagacacgaagctagcattgtacaacaacgtcaagaaagtaaaaatgtttcattagataacctgtttgaacaaatgaaacaaggtgaaatgaaagatttaaacgttattattaaaggtgatgttcaaggttctgttgaagctttagctgcatcattaatgaaaattgatgttgaaggcgtaaatgttcgtatcattcatacagcggttggtgcaattaatgagtcagacgtgacacttgctaatgcctcaaatggtattatcattggtttcaatgttcgtccagacagtggtgcaaaacgtgctgcagaagctgaaaatgttgatatgcgtttacacagagttatttataatgttatcgaagaaattgaatcagcgatgaaaggtttacttgatccagaatttgaagaacaagttatcggacaagctgaagttcgtcaaacattcaaagtttctaaagttggtactattgctggatgttatgttactgaaggtaaaattacgcgaaatgctggtgtacgtattattcgtgatggtattgttcaatatgaaggcgaattagatacacttaaacgtttcaaagatgatgctaaggaagttgcaaaaggttatgaatgtggtattacaattgaaaactacaatgaccttaaagaaggcgatgttatcgaagcatttgaaatggttgaaattaagcgttaa

SEQ ID NO: 310 - DNA, 972 bp, Staphylococcus aureus
atgaaagtcatagaagtgacacatcctatacaatctaaacagtatattacagaggatgttgcaatggcattcggatttttcgatggcatgcataaaggtcatgacaaagtctttgatatattaaatgaaatagctgaggcacgcagtttaaaaaaagcggtgatgacatttgatccgcatccgtctgtcgtgttgaatcctaaaagaaaacgaacaacgtatttaacaccactttcagataaaatcgaaaaaattagccaacatgatattgattattgtatagtggttaatttttcatctaggtttgctaatgtgagcgttgaagattttgttgaaaattatataattaaaaataatgtaaaagaagtcattgctggttttgattttacttttggtaaatttggaaaaggtaatatgactgttcttcaagaatatgatgcgtttaatacgacaattgtgagtaaacaagaaattgaaaatgaaaaaatttctacaacttctattcgtcaagatttaatcaatggtgagttgcaaaaagcgaatgatgctttaggctatatttattctattaaaggcactgtagtgcaaggtgaaaaaaggggaagaactattggcttcccaacagctaacattcaacctagtgatgattatttgttacctcgtaaaggtgtttatgctgttagtattgaaatcggcactgaaaataaattatatcgaggggtagctaacataggtgtaaagccaacatttcatgatcctaacaaagcagaagttgtcatcgaagtgaatatctttgactttgaggataatatttatggtgaacgagtgactgtgaattggcatcatttcttacgtcctgagattaaatttgatggtatcgacccattagttaaacaaatgaacgatgataaatcgcgtgctaaatatttattagcagttgattttggtgatgaagtagcttataatatctag

SEQ ID NO: 311 - DNA, 705 bp, Staphylococcus aureus
atgaaagcattagtattaggtggttctggttcaattggttctgagatagtcaaacaattattaactgatggatttgaagtttatgtgcaatattatcgtactgatataaatgaattaactagcaaatttaatgatgataaagttcgttttatacaagcggatttatctcaaacaattgatattgacaaaacatttggtgacattaaatcattagactgtttaatatatgcaagtggtcagtctttatatggtgttttacaagatatgaaagaccatgatattgatgcatgttatcagttaaatgtcttgcaattaattcgattatgtagatatttcgttgatgttttacgtcaaagtgccaatggaagaattattgtaatttcatcaatttggggtgagacaggagctagtatggaaactatttattcggcgatgaaaagtgcacaattaggtttcgttaaggcgcttagtcaagagcttgcactaacatcagtgacagtaaatgctatcgcacctggatttgtagccggtaatatggcaagtgagtggcaagaagatgaacttcaagcaatgataactgaattaccacaacagcgattggttttaccgagtgaggttgctcatacatgcgcctatttatatcactcaaatgctagaagcgttactggaactatacagaaagttaatggtgcttggtatatttaa

SEQ ID NO: 312 - DNA, 1239 bp, Staphylococcus aureus
atggctcagcaacaaattcatgatactaaaaataaactagaaaaagctgtcttagtcggtgtacatgctcaagatgataagcaatttaattttgagtctacaatggaggaattatcatctttatcagagacttgccaacttgaagtgttgggtcaaattactcaaaacagagatcgtgtagatcgcaaatattatgttggtaaaggtaaaattgaagaaattcaagcatttattgagttcaaagatattgatgtagtcatcacaaatgatgaattaacgactgcacaatccaaatcactaaatgaagctttaggtgtaaaaattattgatagaactcagttgattcttgaaatatttgcattaagagcaagaagtaaagaaggtaaattgcaagtagagctagcacaacttgattatttattacctagattgcaaggccatggtaaaagtctttctcgtttaggtggcggtattggaactagaggccctggtgaaacgaagttagagatggatcgcagacatattcgaactcgtatgaatgaaattaaacatcaattgcggacggtagaagaacatcgcgaaagatatcgaaataaaagaaatcaaaatcaggtgtttcaagtagctttagttggttatacaaatgctggtaaatcatcatggtttaatgttttagcaaatgaagagacgtatgaaaaagatcaattatttgcaacgttagatcctaaaacacgacaaattcaaataaatgatggatttaatttaattatttcagatactgttggttttatacagaaactacctacgacgttaattgcagcttttaaatcaactttagaagaggctaaaggtgcagatttattagtacatgtcgtagatagtagccatcctgaataccgtacgcagtatgacacagttaatgatttaatcaaacaattagatatgagtcatatttctcaaatagttatttttaataaaaaggacttatgtgatcatgcatcaaatcgtccagcaagtgatttgcctaatgtttttgtttcttctaaaaatgatggtgataaattacttgttaagacgttatttattgatgaaatcaaaaggcaattaacttattatgatgagacaattgcgacgaataatgcagatcgattatattttctaaaacaacatacattagtgactgaacttaaatatgatgaaattgaaaatgtttatcgtataaaaggatttaaaaaataa

SEQ ID NO: 313 - DNA, 1998 bp, Staphylococcus aureus
ttggcaatgaataaacaaaataattattcagatgattcaatacaggttttagaggggttagaagcagttcgtaaaagacctggtatgtatattggatcaactgataaacggggattacatcatctagtatatgaaattgtcgataactccgtcgatgaagtattgaatggttacggtaacgaaatagatgtaacaattaataaagatggtagtatttctatagaagataatggacgtggtatgccaacaggtatacataaatcaggtaaaccgacagtcgaagttatctttactgttttacatgcaggaggtaaatttggacaaggcggctataaaacttcaggtggtcttcacggtgttggtgcttcagttgtaaatgcattgagtgaatggcttgaagttgaaatccatcgagatggtagtatatatcatcaaagttttaaaaacggtggttcgccatcttctggtttagtgaaaaaaggtaaaactaagaaaacaggtaccaaagtaacatttaaacctgatgacacaatttttaaagcatctacatcatttaattttgatgttttaagcgaacgactacaagagtctgcgttcttattgaaaaatttaaaaataacgcttaatgatttacgcagtggtaaagagcgtcaagagcattaccattatgaagaaggaatcaaagagtttgttagttatgtcaatgaaggaaaagaagttttgcatgacgtggctacattttcaggtgaagcaaatggtatagaggtagacgtagctttccaatataatgatcaatattcagaaagtattttaagttttgtaaataatgtacgtactaaagatggtggtacacatgaagttggttttaaaacagcaatgacacgtgtatttaatgattatgcacgtcgtattaatgaacttaaaacaaaagataaaaacttagatggtaatgatattcgtgaaggtttaacagctgttgtgtctgttcgtattccagaagaattattacaatttgaaggacaaacgaaatctaaattgggtacttctgaagctagaagtgctgttgattcagttgttgcagacaaattgccattctatttagaagaaaaaggacaattgtctaaatcccttgtgaaaaaagcgattaaagcacaacaagcaagggaagctgcacgtaaagctcgtgaagatgctcgttcaggtaagaaaaacaagcgtaaagacactttgctatctggtaaattaacacctgcacaaagtaaaaacactgaaaaaaatgaattgtatttagtcgaaggtgattctgcgggaggttcagcaaaacttggacgagaccgcaaattccaagcgatattaccattacgtggtaaggtaattaatacagagaaagcacgtctagaagatatttttaaaaatgaagaaattaatacaattatccacacaatcggggcaggcgttggtactgactttaaaattgaagatagtaattataatcgtgtaattattatgactgatgctgatactgatggtgcgcatattcaagtgctattgttaacattcttcttcaaatatatgaaaccgcttgttcaagcaggtcgtgtatttattgctttacctccactttataaattggaaaaaggtaaaggcaaaacaaagcgagttgaatacgcttggacagacgaagagcttaataaattgcaaaaagaacttggtaaaggcttcacgttacaacgttacaaaggtttgggtgagatgaaccctgaacaattatgggaaacgacgatgaacccagaaacacgaactttaattcgtgtacaagttgaagatgaagtgcgttcatctaaacgtgtaacaacattaatgggtgacaaagtacaacctagacgtgaatggattgaaaagcatgttgagtttggtatgcaagaggaccaaagtattttagataattctgaagtacaagtgcttgaaaatgatcaatttgatgaggaggaaatctag

SEQ ID NO: 314 - DNA, 2403 bp, Staphylococcus aureus
gtgagtgaaataattcaagatttatcacttgaagatgttttaggtgatcgctttggaagatatagtaaatatattattcaagagcgtgcattgccagatgttcgtgatggtttaaaaccagtacaacgtcgtattttatatgcaatgtattcaagtggtaatacacacgataaaaatttccgtaaaagtgcgaaaacagtcggtgatgttattggtcaatatcatccacatggagacttctcagtgtacgaagcaatggtccgtttaagtcaagactggaagttacgacatgtcttaatagaaatgcatggtaataatggtagtatcgataatgatccgccagcggcaatgcgttacactgaagctaagttaagcttactagctgaagagttattacgtgatattaataaagagacagtttctttcattccaaactatgatgatacgacactcgaaccaatggtattgccatcaagatttcctaacttactagtgaatggttctacaggtatatctgcaggttacgcgacagatataccaccacataatttagctgaagtgattcaagcaacacttaaatatattgataatccggatattacagtcaatcaattaatgaaatatattaaaggtcctgattttccaactggtggtattattcaaggtattgatggtattaaaaaagcttatgaatcaggtaaaggtagaattatagttcgttctaaagttgaagaagaaactttacgcaatggacgtaaacagttaattattactgaaattccatatgaagtgaacaaaagtagcttagtaaaacgtatcgatgaattacgtgctgacaaaaaagtcgatggtatcgttgaagtacgtgatgaaactgatagaactggtttacgaatagcaattgaattgaaaaaagatgtgaacagtgaatcaatcaaaaattatctttataaaaactctgatttacagatttcatataatttcaacatggtcgctattagtgatggtcgtccaaaattgatgggtattcgtcaaattatagatagttatttgaatcatcaaattgaggttgttgcaaatagaacgaagtttgaattagataatgctgaaaaacgtatgcatatcgttgaaggtttgattaaagcgttgtcaattttagataaagtaattgaattgattcgtagctctaaaaacaagcgtgacgctaaagaaaaccttatcgaagtattcgagttcacagaagaacaggctgaagcaattgtaatgttacagttatatcgtttaacaaacactgacatagttgcgcttgaaggtgaacataaagaacttgaagcattaatcaaacaattacgtcatattcttgataaccatgatgcattattgaatgtcataaaagaagaattgaatgaaattaaaaagaaattcaaatctgaacgactgtctttaattgaagcagaaattgaagaaattaaaattgacaaagaagttatggtgcctagtgaagaagttattttaagtatgacacgtcatggatatattaaacgtacttctattcgtagctttaatgctagcggtgttgaggatattggtttaaaagatggtgacagtttacttaaacatcaagaagtaaatacgcaagataccgtactagtatttacaaataaaggtcgttatctatttataccggttcataaattagcagatattcgttggaaagaattggggcaacatgtatcacaaatagttcctatcgaagaagatgaagtggttattaatgtctttaatgaaaaggactttaatacagatgcattttatgtttttgcgactcaaaatggcatgattaagaaaagtacagtgcctctatttaaaacaacgcgttttaataaacctttaattgctactaaagttaaagaaaatgatgatttgattagtgttatgcgctttgaaaaagatcaattaattaccgtcattactaataaaggtatgtcattaacgtataatacaagtgaactatcagataccggattaagggcagctggtgttaaatcaataaatcttaaagctgaagatttcgttgttatgacagaaggtgtttctgaaaatgatactatattgatggccacacaacgcggctcgttaaaacgtattagttttaaaatcttacaagttgctaaaagagcacaacgtggaataactttattaaaagaattaaagaaaaatccacatcgtattgtagctgcacatgtagtgacaggtgaacatagtcaatatacattatattcaaaatcaaatgaagaacatggtttaattaatgatattcataaatctgaacaatatacaaatggctcattcattgtagatacagatgattttggtgaagtaatagacatgtatattagctaa

SEQ ID NO: 315 - DNA, 984 bp, Staphylococcus aureus
atgaaaaaatggcaatttgttggtactacagctttaggtgcaacactattattaggtgcttgtggtggcggtaatggtggcagtggtaatagtgatttaaaaggggaagctaaaggtgatggctcatcaacagtagcaccaattgtggagaaattaaatgaaaaatgggctcaagatcactcggatgctaaaatctcagcaggacaagctggtacaggtgctggtttccaaaaattcattgcaggagatatcgacttcgctgatgcttctagaccaattaaagatgaagagaagcaaaaattacaagataagaatatcaaatacaaagaatttaaaattgcgcaagatggtgtaacggttgctgtaaataaagaaaatgattttgtagatgaattagacaaacagcaattaaaagcaatttattctggaaaagctaaaacatggaaagatgttaatagtaaatggccagataaaaaaataaatgctgtatcaccaaactcaagtcatggtacttatgacttcttcgaaaatgaagtaatgaataaagaagatattaaagcagaaaaaaatgctgatacaaatgctatcgtttcttctgtaacgaaaaacaaagagggaatcggatactttggatataacttctacgtacaaaataaagataaattaaaagaagttaaaatcaaagatgaaaatggtaaagcaacagagcctacgaaaaaaacaattcaagataactcttatgcattaagtagaccattattcatttatgtaaatgaaaaagcattgaaagataataaagtaatgtcagaatttatcaaattcgtcttagaagataaaggtaaagcagctgaagaagctggatatgtagcagcaccagagaaaacatacaaatcacaattagatgatttaaaagcatttattgataaaaatcaaaaatcagacgacaagaaatctgatgataaaaagtctgaagacaaaaaataa

SEQ ID NO: 316 - DNA, 927 bp, Staphylococcus aureus
atgacttcatctactaatgttaaagctttaatcgaaaaaaatattaataaaaaagggaagcataatgacaaaattataccagttattttagccgcaatttcagcgatttccattttaacaacactaggtatattaatcacattgcttttagaaaccatcacttttttcaccagaattccaataactgaatttctattttctactacttggaatcctaccggttcagaccctaagtttggtatctgggcattgataatagggactttaaaaatcacagttattgcgactatatttgcagttccagtcgggcttggtgcagcaatttatttaagtgaatatgcaagtgaccgtgcacgacgcataattaaaccgatattagaaattttagcaggaataccaacaattgtgtttggtttctttgcattaacctatgttacaccagtattaagatctttcatatcaggtcttggagagtttaatgctataagtcccggcttagttgtcggtattatgattgtccctctcatcacaagtttgagtgaggatgcaatggcatctgtaccaaataaaattcgagaaggtgcctatggacttggagcaactaaattagaagtagcaactaaagtcgtacttcccgcagcaacatcaggtattgtagcttcaatcgttctcgcgatttcaagagcaattggagaaacgatgattgtatcattagcggcaggtagttcgccaacagcttcattaagtttaacaagttcgattcaaacaatgactggatatattgttgagatagcgacaggtgatgcaacatttggatcaaatatttattacagtatttatgctgtagggttcacactatttatctttaccttaatcatgaatttactttctcagtggatttctaagcgttttagggaggagtattaa

SEQ ID NO: 317 - DNA, 1401 bp, Staphylococcus aureus
atggatagaatgtatgagcaaaatcaaatgccacataacaatgaagctgaacagtctgtcttaggttcaattattatagatccagaattgattaatactactcaggaagttttgcttcctgagtcgttttataggggtgcccatcaacatattttccgtgcaatgatgcacttaaatgaagataataaagaaattgatgttgtaacattgatggatcaattatcgacggaaggtacgttgaatgaagcgggtggcccgcaatatcttgcagagttatctacaaatgtaccaacgacgcgaaatgttcagtattatactgatatcgtttctaagcatgcattaaaacgtagattgattcaaactgcagatagtattgccaatgatggatataatgatgaacttgaactagatgcgattttaagtgatgcagaacgtcgaattttagagctatcatcttctcgtgaaagcgatggctttaaagacattcgagacgtcttaggacaagtgtatgaaacagctgaagagcttgatcaaaatagtggtcaaacaccaggtatacctacaggatatcgagatttagaccaaatgacagcagggttcaaccgaaatgatttaattatccttgcagcgcgtccatctgtaggtaagactgcgttcgcacttaatattgcacaaaaagttgcaacgcatgaagatatgtatacagttggtattttctcactagagatgggtgctgatcagttagccacacgtatgatttgtagttctggtaatgttgactcaaaccgcttaagaacgggtactatgactgaggaagattggagtcgttttactatagcggtaggtaaattatcacgtacgaagatttttattgatgatacaccgggtattcgaattaatgatttacgttctaaatgtcgtcgattaaagcaagaacatggcttagacatgattgtgattgactacttacagttgattcaaggtagtggttcacgtgcgtccgataacagacaacaggaagtttctgaaatctctcgtacattaaaagcattagcccgtgaattagaatgtccagttatcgcattaagtcagttatctcgtggtgttgaacaacgacaagataaacgtccaatgatgagtgatattcgtgaatctggttcgattgagcaagatgccgatatcgttgcattcttataccgtgatgattactataaccgtggcggcgatgaagatgatgacgatgatggtggtttcgagccacaaacgaatgatgaaaacggtgaaattgaaattatcattgctaagcaacgtaacggtccaacaggcacagttaagttacactttatgaaacaatataataaatttaccgatatcgattatgcacatgcagatatgatgtaa

SEQ ID NO: 318 - DNA, 1071 bp, Staphylococcus aureus
atgacgaaaatcgcatttaccggagggggaacagttggacacgtatcagtaaatttaagtttaattccaactgcattatcacaaggttatgaagcgctttatattggttctaaaaatggtattgaaagagaaatgattgaatcacaactaccagaaattaagtattatcctatttcgagtggtaaattaagaagatatatttctttagaaaatgccaaagacgtatttaaagtattgaaaggtattcttgatgctcgtaaagttttgaaaaaagaaaaacctgatctattattttcaaaaggtggatttgtatctgtgcctgttgttattgcagccaaatcattaaatataccaactattattcatgaatctgacttaacaccaggattagcgaataagatagcacttaaatttgccaagaaaatatatacaacatttgaagaaacgctaaactacttacctaaagagaaagctgattttattggagcaacaattcgagaagatttaaaaaatggtaatgcacataatggttatcaattaacaggctttaatgaaaataaaaaagttttacttgttatgggtggaagcttaggaagtaaaaaattaaatagcattattcgcgaaaacttagatgcattattacaacaatatcaagtgatacatttaactggtaaaggattaaaagatgctcaagttaaaaaatcaggatatatacaatatgaatttgttaaagaggatttaacagatttattagcaattacggatacagtaataagtagagctggatcaaatgcgatttatgagttcttaacattacgtataccaatgttattagtaccattaggtttagatcaatcccgaggcgaccaaattgacaatgcaaatcattttgctgataaaggttatgctaaaacgattgatgaagaacaattaacagcacaaattttattacaagaactaaatgaaatggaacaggaaagaactcgaattatcaataatatgaaatcgtatgaacaaagttatacgaaagaagctttatttgataagatgattaaagacgcattgaattaa

SEQ ID NO: 319 - DNA, 957 bp, Staphylococcus aureus
atgttgaattcatttgatgcagcatatcacagtctttgtgaagaggttttagaaataggaaatacacgaaatgatcgcacaaatacaggtacgatttcgaaatttggtcatcaacttcgctttgacttatctaaaggatttccactattaacgacaaagaaagtttcttttaaattagtagcaaccgaattattatggttcattaaaggagatacaaacatccaatacttattaaaatataataataatatttggaacgaatgggcttttgaaaattatataaaatcagacgagtataacggtccagatatgacagatttcgggcatcgtgcattgagtgatcctgaatttaacgaacaatataaagaacaaatgaaacaatttaagcaacgtattcttgaagatgatacttttgcgaagcaattcggtgatttaggaaatgtttatggtaaacaatggcgagattgggttgataaagatggtaatcattttgatcaacttaaaacagtaattgaacaaattaagcataatccagattcaagacgacacatcgtatctgcatggaatccaacagaaattgatacaatggcacttccgccttgtcataccatgttccagttttatgtccaagatggtaagttaagttgccagttataccaacgtagcgcagatatctttttaggtgtgccatttaatatcgcaagctacgctttattgacacaccttattgccaaagaatgtggacttgaagtaggagaatttgtgcatacatttggagatgcacatatttattcaaatcatattgatgcgattcaaacacaattagcacgtgaaagcttcaatcctccaacattaaaaattaacagtgacaagtctattttcgacataaattatgaagatttggaaattgttgactatgaatcacatccagcaataaaagctccaatagcagtgtag

SEQ ID NO: 320 - DNA, 480 bp, Staphylococcus aureus
atgactttatccattctagttgcacatgacttgcaacgagtaattggttttgaaaatcaattaccttggcacctaccaaatgatttgaaacatgttaaaaaattatcaacaggtcatactttagtaatgggtcgtaagacatttgaatcgattggtaaaccactaccgaatcgtcgaaatgttgtacttacttcagatacaagtttcaacgtagagggcgttgatgtaattcactctattgaagatatttaccaactaccgggccatgttttcatatttggagggcaaacattatttgaagaaatgattgataaagtggacgacatgtatattactgttattgaaggtaaattccgtggtgatacgttctttccaccttatacatttgaagactgggaagttgcctcttcagttgaaggtaaactagatgagaaaaatacaattccacatacctttctacatttaattcgtaaaaaataa

SEQ ID NO: 321 - DNA, 627 bp, Staphylococcus aureus
atgaattatccaaatggtaaaccatatcgtaaaaatagtgctatagacggagggaaaaagaccgctgcctttagtaatattgagtatggtggacgtggtatgtcacttgaaaaagatatcgaacattcaaatacgttttatcttaaaagcgacattgcagttattcacaaaaagcctacgccagtacaaatagttaatgtcaactatcctaagcggagtaaagctgtgattaacgaagcttattttcgtacaccttcaacaactgattacaacggcgtttatcaaggttattatattgattttgaagcaaaggaaactaaaaacaagacgtcctttcctttaaataatattcatgaccatcaagtcgaacatatgaaaaatgcatatcaacaaaaaggtattgtgtttttaatgattcgttttaaaacgctagatgaagtttatcttttaccctattcaaaattcgaagtattttggaagagatataaagataatattaaaaagtctataacagttgatgaaatacgaaaaaatggttaccatattccttatcagtatcaaccaagattagactatctaaaagcagttgataagttgatattagatgaaagtgaggaccgcgtatga

SEQ ID NO: 322 - DNA, 1143 bp, Staphylococcus aureus
atgaagataggtataacatgttacccgtccatgggtggttctggaattattgccacagaattaggaattaaattagcagagcgaggtcacgaagtacattttatcacttcaaatatcccgtttagaataagaaaaccattgccgaatatgatttttcatcaagttgaagtgaatcaatatgcagtatttcaatatccaccgtatgatattacgttaagtactaaaatcgctgaagttattaaagaatatgatcttgatttgttgcatatgcactatgctgtacctcatgcaatttgtggaattttagctcgtgagatgtcaggtaaagatataaaaattatgacaacgctacacggtactgatattactgttttgggctatgatcattcactccaaggtgcaattaaatttggcattgaaaaaagtgatattgtgacaagtgtgagtaaatctttagcgcaagaaacacatgaaattatcgaaactaacaaagaaattataccgatttataattttgtacgtgaaaatgagtttccaactaaacataacacagcattaaaatcacaatttggtatagcaccagatgaaaaagtgttaatacatgtatcgaattttagacaagtaaaacgcatagatactattatagaaacatttgcaaaagtacgtgaaaagatacctagtaaattaattttacttggagatggtcctgaattagtgccaatgcgtcaattgacgaaagagttaaacgtagaagaggatgttttatttttagggaaacaagattgtgtaagtgaattttatcaattatctgacttagtattattattaagtgaaaaagaaagctttggactaactttacttgaggctatgaaaacaggcgtcgttccaattggttcaaatgccggtggaattaaagaggttattaaacatggtgaaactggatttgttgtagatgtgggtgattgtgattcagcgagtgactatgctatccgtttacttgaagataaggcgttatacaacaaacttcagaaaaacatgctagcagatattgctgaacgttttggatcagaacttattacagatcaatatgagtattattatcaaaaaatgctaaatgagcataacaaaagtaaaggcgagtaa

SEQ ID NO: 323 - DNA, 1203 bp, Staphylococcus aureus
atggataaatcattatttgaacaggcaaggcctatattagaacaaattcaagacaatggttttgaagcatattatgtaggtggctctgtaagagattatgtcatgggaagaaatattcatgatatagatatcacaacaagtgcaacgccggatgaaatagaatctatctttagtcatacgatacctgtaggtaaagaacatggcaccataaatgtagtttttaatgatgaaaattatgaagtgacaacattccgggctgaagaagattatgtcgatcaccgtagaccaagtggtgttacatttgttcgggatttatacgaagatttgcaacgaagagatttcacgatgaatgcgatagcaatggatacagcatacaaattgtatgattattttgatggtcaacaagatattaataatcgaataataagaactgtaggtatagctgaggaacgattccaagaagatgctttacgtatgattcgatgtttaagattccagtcacaattatcatttgatattgcaatggaaacatttgaagcgatgcgtacacaaatggcagatattaaatttttatcaattgagcgtatagtgattgaactaactaaattaatgcgaggtattaatgttgaagagagttttaatcatttaaaatcgctgaaagcatttaattatatgccatatttcgaacaacttgatatgaatcaaattaatgtaactgaaccaattgatttagaattgttgattgctatagtgtcagttaaatttgatattaattactcattgaagcctttaaagctaagtaaccgacaagtaaaagatatcaatcaatatattcaaattatgaatgcattaccaagtattattacaaaagaacaattaaaaatgtttgtttatgattatgatacgaatctcattaaaaatgtaatggttgcagcagacgtgttaaaggcaaatgatattcaaggacatgaaccattaatcgttaaccttcaaacgattgatgaaacattacatcgtttacctatgcataatagaaaagacatgatggttaatggcggtgtacttatggcacatttaaatgccaaaagtggtccgtggttaaaagatgtgctaagacaaattgagatagcgattgtaacaggtaaagtaagcaacgaagaaactgaaattttgaaatgggtggataatcatgtcaaaatatag

SEQ ID NO: 324 - DNA, 960 bp, Staphylococcus aureus
gtggcaaagttaaacatgaacaatgaaattaagaaagtggaacaacgacttgaaaaggcaataaaaagtaaagattctgtattagaacaggcatcattacacttattgtcttctggtggtaaaagagtacgcccagcatttgttattctgagtagccaatttggcaaagatgaacaaacgtctgaacaaacgtatcaagttgcagtcgcattagagttaattcatatggcaacacttgttcatgatgacgttattgataaaagcgacaagcgtcgaggcaagttaaccatatcaaagaaatgggatcagacaactgctattttaactgggaattttttattggcattaggacttgaacacttaatggccgttaaagataatcgtgtacatcaattgatatctgaatctatcgttgatgtttgtagaggggaacttttccaatttcaagaccaatttaacagtcaacagacaattattaattatttacgacgtatcaatcgcaaaacagcactgttaattcaaatatcaactgaagttggtgcaattacttctcaatctgataaagagactgtacgaaaattgaaaatgattggtcattatataggtatgagcttccaaatcattgatgatgtattagacttcacaagtaccgaaaagaaattaggtaagccggtcggaagtgatttgcttaatggtcatattacgttaccgattttattagaaatgcgtaaaaatccagacttcaaattgaaaatcgaacagttacgtcgtgatagtgaacgcaaagaatttgaagaatgtatccaaatcattagaaaatctgacagcatcgatgaggctaaggcagtaagttcgaagtatttaagtaaagctttgaatttgatttctgagttaccagatggacatccgaaatcactacttttaagtttgacgaaaaaaatggggtcaagaaacacatag

SEQ ID NO: 325 - DNA, 1311 bp, Staphylococcus aureus
atgactaaacctatagtagctattgtaggtaggcctaatgtaggtaaatctacaatttttaatagaatagttggagaacgtgtttcgattgtggaagacacgccaggtgtaacacgagatcgtatttattcttcaggtgaatggttaacacatgatttcaatattattgatacaggtggtattgaaattggtgatgcaccattccaaacacaaattagagcgcaggcagaaatcgccatagatgaagcggatgttattatttttatggttaacgtgcgtgaaggattgacacaaagcgatgaaatggtcgctcaaattttatacaaatctaaaaaaccggtcgtattagcggttaacaaagtagataatatggaaatgcgtacagacgtgtatgatttctattcattaggatttggtgaaccgtatccgatatcagggtcacatggtttaggtcttggtgacttgttagatgcagttgtttctcattttggtgaagaggaagaagatccttatgatgaagatacaattcgactatccattattggacgaccaaacgtaggtaaatcaagtttagtaaatgctattttaggtgaagatcgcgttatcgtttctaatgttgcagggacaacgagagacgctattgatacagagtatagttatgatggacaagattatgttttaatcgatactgctggtatgcgtaaaaaaggaaaagtatatgaatcaactgagaaatattcagtactaagagctttaaaagcgattgaacgttcaaatgttgttttagtggtcattgatgcagaacaaggcatcattgaacaagataaacgtgttgcaggatatgcacatgaacaaggtaaagcagtcgtgattgtcgtaaataaatgggatactgtggaaaaagatagtaaaacgatgaagaaatttgaagatgaagtacgtaaagaattccaatttttagattatgcacaaattgcttttgtgtctgctaaagaacgcacaagattacgtacattattcccttacattaatgaagcaagtgaaaaccataaaaaacgtgttcaaagttcaactttaaatgaagttgttactgatgcaatttccatgaaccctacaccaacagacaaaggtagacgtttgaatgtcttttatgcaacacaagttgctatagaaccaccgacatttgttgtatttgttaatgatgtagaattaatgcatttttcttataaacgctatttagagaatcaaatccgtgccgcttttggttttgaaggtacaccaattcatattatagctcgaaagagaaattaa

SEQ ID NO: 326 - DNA, 1407 bp, Staphylococcus aureus
atgacacaacaaattggagttattggtttagccgttatgggtaaaaacctagcttggaatattgaatcacacggatatagtgtatctgtatttaaccgctcaagtgaaaaaactgatttaatggttgaagaatcaaaagggaaaaatattcatccaacgtattcattggaagaatttgttaattctttagaaaaaccacgtaaaattttattaatggttcaagcaggtaaagctacggatgcaacaattgatagtttgttacctttattagatgatggagatattttaattgatggtggtaatacaaactatcaagatactatcagacgtaataaagcattagcacaaagtgcaatcaactttattggtatgggcgtttctggtggtgaaattggagcgttaactggtccgtcattaatgccgggtggacaagaagaagcttataacaaagttgcagatattcttgatgcaattgctgctaaggcaaaagacggtgcttcatgtgttacttatattggaccaaatggtgctggacactatgtgaaaatggtacataatggtattgaatatgctgacatgcaattaattgcagaaagttatgctatgatgaaagaattattaggtatgtctcatgaagacattgctcaaacgttcaaagactggaatgctggtgaattagaaagttatttaattgaaatcactggtgatattttcatgaaattagatgaaaataaagaagcattagttgaaaaaattcttgatactgcaggtcaaaaaggtacaggaaaatggacttcaattaatgcattagaattaggtattccattaacaatcattactgaatctgtatttgcacgttttatctcttcaatcaaagaagagcgcgtaaatgcttctaaagaattaaatggtccaaaagcatcatttgatggtgacaagaaagactttttagaaaaaattcgtaaagcattatatatgagtaaaatttgttcttatgcacaaggtttcgcgcaaatgcgtaaagcaagtgaagataatgaatggaatttaaaacttggtgatttagctatgatttggagagaaggttgcattatacgtgcacaattcttacaaaagatcaaagatgcttacgataataatccaggattacaaaacttattgctagatccttactttaaaaacatcgttactgaatatcaagatgcgttacgtgatgttgtcgcaactggtgttcaaaatggtgtaccaacacctggtttctcatcaagtattaattactatgatagttaccgtgcagctgatttacctgcaaacttaattcaagcacaacgtgactacttcggtgctcacacgtacgaaagaaaagataaagaaggcgtattccatacacaatggattgaagaataa

SEQ ID NO: 327 - DNA, 1422 bp, Staphylococcus aureus
atgtcagagaaacaatatgatttagtcgttctcggtggaggtactgcaggatatgttgctgcgatacgtgcgtctcaattaggtaagaaagtggcaatagtagaacgacaactattaggaggtacttgtctccataaaggttgtattcctactaaatcgctgcttaaatctgctgaagtatttcaaacagtaaaacaggcagcaatgtttggcgttgatgtcaaagatgctaatgttaattttgaaaatatgttggcacgaaaagaagacattattaatcaaatgtatcaaggtgtaaagcatttaatgcaacacaatcacattgacatttataatggcacgggacgtattctaggtacatctatattttcacctcaaagtggcacaatttctgtcgaatatgaagatggtgaatcagacttattacccaaccaatttgtattaattgcaactggttcttcgcctgcagagttgccattcttatcatttgatcatgataaaattttatctagcgatgatatattatcattaaagacgttaccatcaagtattggtattattggtggtggtgttatcggaatggaatttgcatcattgatgatagatttaggtgttgacgtaacagttatagaagcaggtgaaagaattttaccaactgaaagtaaacaagcttcacaactattaaaaaaatcattgtcagcacgtggtgttaaattctatgagggaataaaactttctgaaaatgatataaatgttaacgaagatggtgttacgtttgaaatttcttcagacataattaaagtagataaagtgttgctatcgattggtagaaaacctaacacatcagatattggtttaaacaacactaaaataaaactttctacatcaggacatattttaacgaacgaatttcaacaaactgaagataaacatatttatgcagctggtgattgtataggaaaattacaattggcacatgttggatcaaaagaaggtgttgtggctgttgatcatatgtttgaggggaacccaatcccagtaaactataacatgatgcctaagtgtatttattcacaacctgaaattgcttctatcggtttaaacattgaacaagcaaaggcagagggaatgaaagttaaaagttttaaagtaccatttaaagcaattggtaaagcagtgattgatagccatgacgcaaacgaagggtatagcgaaatggtgattgatcaatcaactgaagaaattgtgggtattaatatgattggtccacatgtaacagaattgattaatgaggcatcactgttacagttcatgaatggctcggcattagaattaggactaacaacacacgcacatccttccatctctgaagtgttgatggaattaggattgaaagcagaaagtagagctattcacgtataa

SEQ ID NO: 328 - DNA, 984 bp, Staphylococcus aureus
atggctaaattatcttatttagaggcgatacgccaggcacaagacttagcattacaacaaaataaagatgtgtttattcttggtgaagatgttggtaaaaaaggtggcgtatttggtactactcaaggactacaacaacaatatggtgaagacagagttatcgatacgccattagctgagtcaaatattgttggaactgccattggtgcagctatggtaggtaaaagaccaattgcagaaattcaatttgcagattttattttacctgcgacaaatcaaattattagtgaagctgcgaaaatgcgttatcgttcaaataatgattggcaatgcccattaacgattcgtgcaccatttggtggcggtgttcacggaggactatatcattcacaaagtattgaaagtatatttgcttcatcaccaggtttaacaattgttattccttccacaccgtatgatgctaaagggcttttattatcatctatcgaatcaaatgatccagtattgtactttgagcataaaaaagcttatcgtttcttaaaggaagaagtgccagaagaatattacactgtacctttaggaaaagcagatgttaaacgtgaaggtgaagatttaacagtattttgttatggattaatggtcaattattgtttacaagcagcggatattttagctgcagacggtatcaacgttgaagtcgttgatttacgaactgtttatccattagataaagaaacaattattgatcgtgctaaaaatacaggtaaagttttacttgtaactgaagataatttagaaggtagtattatgtcagaagtgtcagcgattattgcagagcattgcttgttcgatttagatgcaccaatcatgcgtttagctgctccagatgtaccatctatgccattttctcctgtattagaaaatgaaattatgatgaatccagaaaaaatcttaaataaaatgcgtgaattagcagaattctag

SEQ ID NO: 329 - DNA, 465 bp, Staphylococcus aureus
atgaactttaaagaaatcaaagaattaattgaaattctggataaatcaactttaacggaaatcaatattgaagatactaaaggcaaagtgacgcttaagaaagaaaaagaaactgagattatcacgccacaaatctcacaaatgccagttgaagctgcggcaatgcctatgcctcaagcacaatcaactgatagcaataaaactgaagctccaaagccaacttcagataatcacaaaacaattaatgcacctatggtaggtacattttacaaatcgccatctccagacgaagaagcatatgtgcaagttggggacactgtttcaaatgaaacaacagtgtgtattttagaggcaatgaaactatttaatgaaattcaagcagaaatttcaggtgaaattgttgaaatcttagtagaagacggacaaatggtagagtatggccaaccgttatttaaggtgaaataa

SEQ ID NO: 330 - DNA, 1356 bp, Staphylococcus aureus
atgaaaaaggttttaattgcaaaccgcggtgaaatcgcagttaggattattcgcgcttgtcgtgatttaggcatccaaactgttgcaatctattctgaaggggataaagatgcgctacatactcaaattgctgatgaagcatattgcgtaggtcccactttgtctaaagattcatatttaaatattccgaacatcttatctattgcaacttctacaggttgtgatggcgttcatccgggttatggctttttagctgaaaatgctgactttgcagaattatgcgaagcatgccaattgaagttcattggaccaagttatcaatctatccaaaaaatgggtatcaaagatgttgctaaggcagaaatgatcaaagccaatgttccagttgttcctggtagtgacggtttaatgaaagacgtctcagaagctaagaaaatcgctaagaaaattggctatccggtcatcattaaagctactgctggtggtggcggaaaaggtatccgtgttgctcgtgatgaaaaagaacttgaaactggcttccgaatgacagaacaagaagctcaaactgcatttggtaatggtggactttatatggagaaattcatcgaaaacttccgccatattgaaatccaaattgttggggacagctatggtaatgtaattcatttaggagaacgtgattgtacaattcaaagacgtatgcagaaattagtggaagaagcaccttccccaattttagatgatgaaacacgtcgtgaaatgggaaatgccgcagttcgtgcagcgaaagctgtaaattatgaaaatgcgggaacaattgagtttatatatgatttaaatgataataaattttattttatggaaatgaatacacgtattcaagtagaacatcctgtaactgaaatggtaacaggaattgatttagttaaattacaattacaagttgctatgggtgacgtgttaccgtataaacaagaagatattaaattaacaggacacgcaattgaatttagaattaatgctgaaaatccttacaagaactttatgccatcaccaggtaaaattgagcaatatcttgcaccaggtggatatggtgttcgaatagagtcagcatgttatactaattatacgataccgccatattatgattcgatggtagcgaaattaatcatacatgaaccgacacgagatgaagcgattatggctggcattcgtgcattaagtgaatttgtggttcttggtattgatacaactattccattccatattaaattattgaataacgatatatttagaagcggtaaatttaatacaaactttttagagcaaaatagcattatgaatgatgaaggttaa

SEQ ID NO: 331 - DNA, 390 bp, Staphylococcus aureus
atgagtcgtaaagaatcccgagtgcaagcttttcaaactttatttcaattagaaatgaaggacagtgatttaacgataaatgaagcgataagttttattaaagacgataatccagatttagactttgaatttattcattggctagtttctggcgttaaagatcacgaacctgtattagacgagacaattagtccttatttaaaagattggactattgcacgtttattaaaaacggatcgtattattttaagaatggcaacatatgaaatattacacagtgatacacctgctaaagtcgtaatgaatgaagcagttgaattaacaaaacaattcagtgatgatgatcattataaatttataaatggtgtattgagtaatataaaaaaataa

SEQ ID NO: 332 - DNA, 1818 bp, Staphylococcus aureus
ttgcgaatagatcaatcgatcattaatgaaataaaagataaaaccgacattttagacttggtaagtgaatatgtaaaactagaaaagagaggacgcaattatataggtttgtgtccttttcatgatgaaaagacaccttcatttacagtttctgaagataaacaaatctgtcattgttttggttgtaaaaaaggtggcaatgtttttcaatttactcaagaaattaaagacatatcatttgttgaagcggttaaagaattaggtgatagagttaatgttgctgtagatattgaggcaacacaatctaactcaaatgttcaaattgcttctgatgatttacaaatgattgaaatgcatgagttaatacaagaattttattattacgctttaacaaagacagtcgaaggcgaacaagcattaacatacttacaagaacgtggttttacagatgcgcttattaaagagcgaggcattggctttgcacccgatagctcacatttttgtcatgattttcttcaaaaaaagggttacgatattgaattagcatatgaagccggattattatcacgtaacgaagaaaatttcagttattacgatagatttcgaaatcgtattatgtttcctttgaaaaatgcgcaaggaagaattgttggatattcaggtcgaacatataccggtcaagaaccaaaatacctaaatagtcctgaaacgcctatctttcaaaaaagaaagttgttatataacttagataaagcacgtaaatcaattagaaaattagatgaaattgtattactagaaggttttatggatgttataaaatctgatactgctggcttgaaaaacgttgttgcaacaatgggtacacagttgtcagatgaacatattacctttatacgaaagttaacatcaaatataacattaatgtttgatggggattttgcgggtagtgaagcaacacttaaaacaggtcaacatttgttacagcaagggctaaatgtatttgttatacaattgccatctggcatggatccggatgaatacattggtaagtatggcaacgacgcatttactacttttgtaaaaaatgacaaaaagtcatttgcacattataaagtaagtatattaaaagatgaaattgcacataatgacctttcatatgaacgttatttgaaagaactgagtcatgacatttcacttatgaagtcatcaattctgcaacaaaaggctataaatgatgttgcgccatttttcaatgttagtcctgagcagttagctaacgaaatacaattcaatcaagcaccagccaattattatccagaagatgagtatggcggttatgatgagtatggcggttatattgaacctgagccaattggtatggcacaatttgacaatttgagccgtcaagaaaaagcggagcgagcatttttaaaacatttaatgagagataaagatacatttttaaattattatgaaagtgttgataaggataacttcacaaatcagcattttaaatatgtattcgaagtcttacatgatttttatgcggaaaatgatcaatataatatcagtgatgctgtgcagtatgttaattcaaatgagttgagagaaacactaattagcttagaacaatataatttgaatgacgaaccatatgaaaatgaaattgatgattatgtcaatgttattaatgaaaaaggacaagaaacaattgagtcattgaatcataaattaagggaagctacaaggattggcgatgtagaattacaaaaatactatttacagcaaattgttgctaagaataaagaacgcatgtag

SEQ ID NO: 333 - DNA, 1107 bp, Staphylococcus aureus
atgtctgataacacagttaaaattaaaaaacaaacaattgatccgacattaacattagaagatgttaagaagcaattaattgaaaaaggtaaaaaagagggtcatttaagtcatgaagaaattgctgaaaaacttcagaattttgatatcgactctgatcaaatggatgatttctttgatcaattaaatgataatgatatttcactagttaatgaaaaagatagttcagatactgacgagaaactgaatccaagtgatcttagtgcccctccaggtgttaaaataaatgacccagttcgtatgtaccttaaagaaattgggcgtgttaacttattaagtgcacaagaagaaatcgaattagccaaacgtattgaacaaggtgatgaagtagcaaaatcaagacttgcagaagcgaacttacgtttagttgtaagtattgctaaaagatacgtaggtcgtggtatgttattccttgatttaatccaagaaggtaatatgggtcttattaaagctgttgaaaaatttgactttaacaaaggatttaagttttcaacatatgcaacatggtggattagacaagcaatcactcgtgcaattgctgaccaagcacgtacgattcgtatccctgtgcatatggtagaaacaattaataaattaattcgtgttcaacgtcaattattacaggacttaggtcgagatccagcaccagaagaaattggtgaagaaatggatttaccagcagaaaaagttcgtgaaattttaaaaattgcgcaagaacctgtttcattagaaacaccaattggtgaagaagatgatagtcatttaggagactttattgaggatcaggaagcacaaagtccttcagatcatgctgcttatgaattattaaaagagcaattagaagatgtgcttgatacattaactgatagagaagaaaatgtattacgattaagatttggtcttgatgacggcagaacaagaacacttgaagaagttggtaaagttttcggtgttacacgtgaacgtattcgacaaattgaagcaaaagcacttagaaaattaagacatccaagtcgtagtaaacgtttgaaagactttatggattaa

SEQ ID NO: 334 - DNA, 678 bp, Staphylococcus aureus
atgatttcgttaaataaccgattaacgacggtaagtcgatttttaaaacaaggtacaatcgcggatattggctcagatcatgcttatttgccaatctatgcaattcaaaaccatttatgcgaatgcggtattgctggagaagttattcaaggcccttttcaagctgctgtgaaaaatgtagctgcaaatcatttagtagaaagaattgatgtacgtttaggggatggcttaagtgttattcatcctgaggacgtaatcgataatatcacaatttgtggtatgggcggaccacttattgctaaaattttaaaagatgggcaagataagttaagtcaacatccaaggttgattttacaaagtaatatacaaactgaaaatttaagacaaacattacaacaattgaattatgaaataattgatgaaataataatggaagaaaaaggccatatttatgaaattgttgtagcagaacattctacacaattaatagagctatcatctgatgaattgaaattcggaccaaaattgctgaacaacaaaaatgaatattttataaaaaaatggcaaagagagttagaagcactttatcatattaaatcgaaactcaatactgaacaacatcatcaacgtttagctcaaattaatgacgaaattgctgtaattgaaagggtgttatag

SEQ ID NO: 335 - DNA, 1347 bp, Staphylococcus aureus
atggcaaaacatccattcgaacaatttaatctagaatctagtttaattgacgctgtgaaagaccttaattttgaaaaaccaactgaaattcagaatcgaattattccaagaatactaaagagaacaaatttaattggtcaatctcaaacgggtacagggaaatctcatgcatttttattaccattaatgcagttaattgatagtgaaataaaagaaccacaagcaatcgtagttgcaccaacaagagaacttgcacaacaactatacgatgcagcgaaccatttaagccaatttaaagctggtgtttcagttaaagtttttattggtggtacagatatagagaaagatagacaacgttgtaatgcacaaccacaattgattataggcacccctactagaattaatgacttagctaaaacgggacatttacatgtgcacttagcatcatatttagttattgatgaagcggatcttatgattgacttaggattaattgaagatgtagattacattgctgcaagattggaagataatgcaaatattgcggtgtttagtgctacaattccacaacagttacaaccatttttaaataaatatttaagtcatccagaatatgtagctgtcgacagtaaaaaacaaaataaaaagaacatcgaattctttttaatacctactaaaggtgcagctaaagttgaaaaaactttaaatttaattgatatactaaatccatacttatgtattattttctgtaatagtagagataatgcaaatgatttagcacgttcactaaatgaagctggtattaaagttggtatgattcatggtggtttaacgccacgtgaacgtaaacaacaaatgaaacgtatacgtaatttagaattccaatacgttattgccagcgatttagcatctcgtggtattgatattgaaggtgttagtcatgtcatcaattttgatgtgccaaatgatattgacttctttacgcatagagttggacgaactggtcgtgggaattataaaggtgtagcaattacgctttatagtcctgatgaagaacacaatatttcattaatagaagatcgcggttttgtattcaatactgttgatattaaagatggtgagttaaaagaagttaaagcgcacaatcagcgtcaagcaagaatgcgcaaagatgaccatttaactaatcaagtgaaggacaaagttcgaagtaaaattaaaaacaaagttaaaccaggttataagaagaaatttaaacaagaagttgaaaaaatgaaacgtcaagagcgtaaacaatttagtaagcagcaaaatagacaaaaacgtaagcaaaacaaaaaaggttag

SEQ ID NO: 336 - DNA, 900 bp, Staphylococcus aureus
atgacagaacataaatcaggatttgtttcaattataggtagaccaaatgtagggaagtcaacatttgttaatagagtgattggccataaaatagcaatcatgtccgataaagctcaaacaactagaaataaaattcaaggtgttatgacaagagatgacgcgcaaattatattcattgatacgccaggtattcataaacctaaacacaaattaggtgactatatgatgaaagtcgctaaaaatacattatctgaaatagatgcaatcatgtttatggttaatgccaatgaggaaattggacgaggcgatgaatatattatagaaatgttgaaaaatgttaagacaccagtatttttagtattaaataaaatagatttagtgcatccagatgaattaatgccaaagattgaagaatatcaaagttatatggactttacagagattgtacctatttcagcattagaagggctaaatgtagatcattttattgatgttttaaagacgtatttacccgaaggacctaaatattatccagatgatcaaatttcagaccatcctgaacaatttgtagtgggtgaaatcattcgtgaaaaaatccttcatcttacaagtgaagaaatccctcatgcgattggtgttaatgtggaccgtatggttaaagaaagcgaagatcgtgttcatatcgaagcaactatatatgttgaaagagattcgcaaaaaggaattgtcattggaaaaggcggtaaaaagttaaaagaagtaggaaaacgtgcgagacgtgatatagaaatgcttctaggctctaaagtatacttagaattatgggtcaaagttcaaagagactggcgaaacaaagttaactttattcgccaaattggttatgttgaagaccaagattaa

SEQ ID NO: 337 - DNA, 627 bp, Staphylococcus aureus
atgacaaataaagacgaatcagttgaaaaaaacactgaatcaacagttgaagaaacaaacatcaaacaaaatattgatgattcagttgaacaagctgaagaaagtaaaggtcatttacaagatgaagcaatagaagaaacgtctgacgagaatgttattgaagaaatagatccaaaagatcaaaaaattaatgaacttcaacaattagcagatgaaaacgaagagaaatatttaaggctctacgctgagtttgaaaattataagcgtagaattcaaaaagaaaatgaaataaataaaacatatcaagcacaacgtgtgttaacagatattttaccagcaatagacaatatagaacgtgcacttcaaattgaaggtgatgatgagacttttaaatctcttcaaaaaggtgtacaaatggtgcatgaaagtttgattaacgcactaaaagataatggtcttgaagttattaaaactgaaggtgaagcatttgatccaaatattcaccaagctgtagttcaagatgataaccctgattttgaatctggcgaaatcactcaagaactacaaaaaggatacaagcttaaagatagagtattaagaccatcaatggtcaaagtaaaccaataa

SEQ ID NO: 338 - DNA, 1833 bp, Staphylococcus aureus
atgagtaaaattattggcatagacttaggtacaacaaattcatgtgtaacagtattagaaggcgatgagccaaaagtaattcaaaaccctgaaggttcacgtacaacaccatctgttgtagctttcaaaaatggagaaactcaagttggtgaagtagctaaacgtcaagctattacaaacccaaacactgttcaatctattaaacgtcatatgggtactgattataaagtagatattgaaggtaaatcatacacaccacaagaaatctcagctatgattttacaaaatttaaaaaatacagctgaaagctatttaggtgagaaagttgacaaagctgtaattacagtacctgcatactttaacgacgctgaacgtcaagcaactaaagatgctggtaaaattgctggtttagaagttgagcgtatcattaatgaaccaacagctgcagcattagcatatggtttagataaaactgataaagatgaaaaagttcttgtttttgacttaggtggcggtacatttgacgtatctatcctagaattaggtgacggtgtattcgaagtactatcaacagccggtgacaacaaacttggcggtgatgattttgaccaagtaattattgactacctagttgcagaattcaaaaaagaaaatggcgtagacttatctcaagataaaatggcattacaacgtttgaaagatgctgctgaaaaagctaaaaaagacttatcaggtgtatcacaaactcaaatctcattaccatttatctcagctggtgaaaacggtccattacacttagaagtaaacttaactcgttctaaatttgaagaattatcagattcattaattagaagaacaatggaacctacacgccaagcaatgaaagacgctggcttaacaaactcagatatcgatgaagttatcttagttggtggatcaactcgtattccagcagtacaagaagctgtcaaaaaagaaatcggtaaagaacctaacaaaggtgtaaacccggacgaagtagtggcaatgggagctgcaatccaaggtggcgttatcacaggtgacgttaaagacgtagtattattagacgtaacaccactatctttaggtattgaaattttaggtggacgtatgaatacgttaattgaacgtaacactacgattcctacatctaaatctcaaatctattcaacagcagtagataatcaaccatcagtagatgtacacgtattacaaggtgaacgtccaatggctgcggataataaaacacttggtagattccaattgactgatattccaccagctgaacgtggtaaacctcaaattgaagtaacgtttgatatcgataaaaacggtattgtaaatgtaactgcaaaagacttaggtacaaataaagaacaaagaattacaattcaatcaagttcttcattatcagacgaagaaatcgaccgtatggtaaaagatgctgaagttaacgctgaagcagataaaaaacgtcgtgaagaagtagacttaagaaacgaagctgacagtctagtattccaagttgaaaaaactttaactgatttaggcgaaaatattggtgaagaagataaaaaatctgctgaagagaaaaaagacgctcttaaaactgctttagaaggtcaagatatagaagatattaaatctaaaaaagaagaacttgaaaaagtgattcaagaattatcagcaaaagtatatgagcaagcggctcaacagcaacaacaagcacaaggtgcaaatgctggtcaaaacaacgatagtactgtagaagatgctgaatttaaagaagtaaaagacgacgacaaaaaataa

SEQ ID NO: 339 - DNA, 528 bp, Staphylococcus aureus
atgggtttagttcgcaagttttttatgccgaattcatatgttcaatcaatatttcaaattgatttagacaagttagtggacaaaggcgttaaaggtattattacagatttagataatacgctagtaggttgggatgttaaagaacctacagaacgtgttaaagcatggtttaaggaagctaatgaaaaaggaatcactattacaatcgtgtctaataataatgagtctcgtgttgctagttttagtcagcatttagacatcgattttatttttaaagcgagaaagccaatggggaaagcgtttgataaagcaataactaagatgaatatcagaccagatcaaactgttgttataggtgaccaaatgcttactgatgtatttggtggtaatcgtcgaggtctatatacaattatggttgttccagttaaacgaactgatggctttattactaaggttaatagattaattgaaagacgattattacgtcatttcagtaaaaaaggttatatcacatgggaggaaaattga

SEQ ID NO: 340 - DNA, 1101 bp, Staphylococcus aureus
ttgtctgacattttaaaatgtatcggttgtggtgcgccacttcaatctgaagataaaaataaacctggttttgtaccagagcataatatgtttcgtgatgacgtgatttgcagacgttgtttccgcttgaaaaattataacgaagttcaagatgtaggattagaaagtgaagactttttaaaattattatcaggacttgcggataaaaagggtattgtcgtcaatgtcgtggatgtatttgactttgaaggatcatttattaatgcagttaaacgtattgtcggaaacaaaaaaatcattttagcagcaaataaattggatttattgccgaaacaaattaataaacgtcgagttaaagaatggttaaaacgaacagcaagaaaatatggtttggaagctgacgatgtcgtattaatttcagctgaaaaaggctggggcatagacgacttattatcatcaattgcgaatattcgagaaaatgaagatgtgtatattgtagggacaacgaatgttgggaaatctacattgattaataaactgattgaagctagtgttggtgaaaaagatgtagtaacaacttcaagattccctggaacaactttagatatgatagatattcctttagatgaatcatcatttatgtatgatacaccaggtattattcaagatcatcaaatgacgcatttagttagtgaaaaagaattgaaaattattatgcctaagaaagaaataaaacaacgcgtatatcaattaaatgaggcgcagacattattcttcggcggtctagcgcgcatagattatgtatcaggtggtaaacgtccgttagtttgtttcttttctaatgacttgaatatacatcgtactaaaacggagaaggctaatgatttatggcgtaatcaacttggcgatttattaacgccacctggaaatccacaaaattttgatcttaatgagttaaaggctgttagacttgaaacaggcaaagagaaacgtgatgttatgatctctggtctaggctttataactataggaccaggagctaaagtaatcgttcgtgttcctaaaaatgttgatgttgtattaagaaattctattttataa

SEQ ID NO: 341 - DNA, 807 bp, Staphylococcus aureus
atgaaatttgcagttatcggaaatcctatttcacattccttgtcgcccgttatgcatagagcaaattttaattctttaggattagatgatacttatgaagctttaaatattccaattgaagattttcatttaattaaagaaattatttcgaaaaaagaattagatggctttaatatcacaattcctcataaagaacgtatcataccgtatttagattatgttgatgaacaagcgattaatgcaggtgcagttaacactgttttgataaaagatggcaagtggatagggtataatacagatggtattggttatgttaaaggattgcacagcgtttatccagatttagaaaatgcatacattttaattttgggcgcaggtggtgcaagtaaaggtattgcttatgaattagcaaaatttgtaaagcccaaattaactgttgcgaatagaacgatggctcgttttgaatcttggaatttaaatataaaccaaatttcattggcagatgctgaaaagtatttagctgaattcgatatcgttattaatacaacaccagcgggtatggctggaaataacgaaagtattattaatttaaaacatctttctcccaatactttaatgagtgatattgtttatataccgtataaaacacctattttagaggaagcagagcgcaagggaaaccatatttataatggcttagatatgtttgtttaccaaggtgcggaaagctttaaaatttggactaataaagatgctgatattaattctatgaaaacagcagttttacaacaattaaaaggagaataa

SEQ ID NO: 342 - DNA, 570 bp, Staphylococcus aureus
atgaaaaagatagtactttacggcggtcagtttaaccctatccatactgcacatatgatagtagctagcgaagtatttcatgaattacagccagatgaattttattttttacctagttttatgtctccattgaaaaagcacaataattttatagatgttcagcacagattaacaatgatacagatgattatcgacgagcttggttttggagatatttgcgacgatgaaattaaacgtggtggtcagagttatacctatgacacgatcaaggcattcaaggagcaacacaaagacagtgagttgtactttgttattgggacggatcagtataaccaactagagaaatggtatcaaattgaatacttaaaagaaatggttacttttgtagttgtaaatcgagacaaaaatagtcaaaatgttgaaaatgctatgattgcaattcagatacctagggtagatataagttcgacaatgattcgacaaagagttagtgaagggaaatctatccaagttcttgttcctaaatccgttgaaaactatattaagggggaaggattatatgaacattga

SEQ ID NO: 343 - DNA, 975 bp, Staphylococcus aureus
atgagcgacaatattgtagctatttatggagatgtgcctgaattggttgaaaaacaaagtgcagaaatcatatcacaatttttgaaaagtgatagagatgactttaactttgtgaaatataatttatacgaaacagagattgcaccaattgttgaagaaacattaacattgcctttcttttcagataaaaaagcaattttggttaaaaatgcatatatatttacaggtgaaaaagcgccaaaagatatggctcataatgtagatcaattaatagaatttattgaaaaatatgatggcgaaaatttgattgtctttgagatatatcaaaataaacttgatgaaagaaaaaagttaactaaaactctaaaaaagcatgcaaggcttaaaaaaatagagcaaatgtctgaagaagaaataaaaaaatggattcaaagtaaattaaatgagaatttcaaagatatcaaaagagatgcattagatttatttattgagttgacaggtattaactttaatattgtctcacaagagatagaaaagttgattttatttttaggcgatagaccaacaattaataagcaggatgttaaccaaattattaatagaagtttagagcaaaatgtatttttactgactgaatacattcagaaaagaaagaaagaacaagcaattcatttagtaaaagatttaataactatgaaagaagaaccaattaaattacttgcactaattacaagtaattaccgattattttatcaatgtaagattctgagtcaaaaaggatatagtggacagcaaattgctaaaacaataggagtgcatccatacagagtaaaattagcgttaggacaagtaagacattatcaacttgatgaattattgaatattgtagatgcttgtgcggaaactgattataaacttaaatcatcatatatggataaacagttaatactggaattattcattctatctttataa

SEQ ID NO: 344 - DNA, 477 bp, Staphylococcus aureus
atggaaaatcaaaagcaatatccaatgactcaagaaggttttgaaaaattagagcgtgaacttgaagaattaaaaacagttaagcgtcctgaagttgtagagaaaattaaagttgcacgttcatttggtgacttatcagagaactctgagtatgatgcagcaaaagatgaacaaggattcatcgaacaagatattcaaagaattgagcatatgttaagaaatgcattaatcattgaagatactggagataacaacgttgttaaaattggtaaaacagtaacgtttgtagaattaccaggtgatgaagaggaaagttatcaaatcgttggttcagctgaatcagatgcatttaatggtaagatttcaaatgaatcaccaatggctaaagcgttaattggtaaaggtttagatgatgaagttcgtgttccactacctaatggtggcgaaatgaacgtaaaaattgttaatatccaataa

SEQ ID NO: 345 - DNA, 2631 bp, Staphylococcus aureus; identical to SEQ ID NO: 91

SEQ ID NO: 346 - DNA, 372 bp, Staphylococcus aureus
attagtgatataatgggttggacggcacaaggattagacacactccgaatcaatgaagaaaataatgaattaggtattgaccaattagtagacattattaaaaaacataatgtgggtacagtcgtaataggactacctaaaaacatgaataattcaataggatttcgaggcgaagcttcgttaacatataaagaaaaattattagaagcttatccttctattgagattgtgatgtgggatgaaagattaagcacaatggctgctgaacgatcattattagaagcagatgtttcaagacaaaaaagaaaacaagtgattgataaaatggcagcggtatttattttacaaggctatttagattcactacattaa

SEQ ID NO: 347 - DNA, 1143 bp, Staphylococcus aureus
atggaaatttatgcagattatgctgcgaccacaccagtaaaacctgaagtagtagatgcgatgatgatgatttacaattcgcattatggtaatccatcatcaatacatgctaagggaagagatgcgcgtaaatatttagatgagtcaagacgtcaaattgcacaattacttggtgcagatacacatgaaattatatttacgagtggtgcaacagaatcgaataatacggcaattaaaggcatagtaaaagcaaatgaacaattgggtaatcacattatcacatcgaagattgaacatcattctgtgttacatgtttttgaacaattagagcgagaaggttttgatgtaacatatctagatgttgatgatacaggtgctattgatttagatcaacttgaagaaacaattacagataagacgattttagtatctattatgtttgtaaataatgaagttggcacagtgcaacaaatttatgatattcaagatattattgctgagacaaatgcatatttccatgttgatgcggttcaagcaattggacatcttgatgttaagtttgacgaatttgagatcgacgcaatgagtattactgcacataagtttggcggaccaaaaggtgtcggtgcattattagttaaagaccatgtcacattagattatcctcaacttggcggtgaacaagaattgaaacgccgtgcaggtactgaaaatcttgcacaaattgtcgggatggctaaagcattacaattagcagaaaagaatcgagacgataacaatattcatttaatgaatttaaaagaacaatttttagttaaattacaagaaagagcgattccatttgaattaaatggttcaatgacggatgctacaggccatattgtaaatctatattttccgtttgttgaagttgaaatgatgttaacattgttggatatggcacaaatctatgtgtcgtctggatctgcatgtacagcaggctctacacaaccgtcgcatgttttagatgcaatgttcgaagatgaggagcgatcaaatcattcgattcgatttagttttaacgaattgactactgaaaatgaaattaatgcaattgtagctgaaattcataaaatatattttaaatttaaggaggagtcataa

SEQ ID NO: 348 - DNA, 1119 bp, Staphylococcus aureus
ttgtcaaataaagatatacgtgttgtcgttggtatgtcaggcggtgtagatagttctgtaacagcccacgtcttaaaagaacaaggttatgatgtcattggcatatttatgaaaaactgggatgacactgacgaaaatggcgtatgtactgcaactgaagattacaacgatgttattgaagtgtgtaatcaaattggcattccatattacgctgttaattttgaaaaagaatattgggataaagtctttacgtatttcttagatgaatacaaaaaaggtcgtactccaaatccagacgttatgtgtaataaagaaattaagtttaaagcctttttagatcatgcgatgaatttaggtgcagattatgtagcaacaggacattacgcacgcatacatcgtcatgaagatggtcatgttgaaatgttacgtggtgtagataataataaagatcaaacatacttcttgaatcaattatctcaacaacaactttcaaaagtgatgttcccaattggcgacatcgaaaagagtgaagtgcgtcgaattgctgaagaacaaggacttgttactgctaagaaaaaagattctacaggcatttgttttatcggcgaaaaaaactttaaaacatttttatcacaatatttacctgcacaaccgggtgatatgataacacttgatggtaagaaaatgggtaaacatagtggtttgatgtattacacaataggacaaagacatggattaggtataggtggagatggcgatccttggtttgttgtcggtaaaaacctaaaagataatgttttatatgtagaacaaggattccatcacgatgcattatacagtgattacttaattgcttcagactattcatttgtaaatccagaagataatgacttagatcaaggttttgaatgtacagctaaatttagatatcgccaaaaagatacgaaagtttttgtgaaacgtgaaaacgaccatgcactacgtgttacttttgctgagccagtaagagcaatcacacctggacaagcagttgttttttatcaaggtgatgtgtgtcttggtggtgcaacaattgacgatgtgttcaaaaatgaaggtcaattaaattttgttgtataa

SEQ ID NO: 349 - DNA, 1263 bp, Staphylococcus aureus
atgattaaaatacctagagggacgcaggatattttacctgaagattcaaagaaatggcgttacattgaaaatcaattagatgaattaatgacattttataattataaagaaataagaacaccaatttttgaaagtacagatctttttgcaagaggtgttggtgattcaaccgatgtcgtacaaaaagaaatgtatacatttaaagataaaggcgatagaagtattacattaagacctgagggaacagctgcagttgtgcgttcatatattgaacataaaatgcaaggtaatccaaaccaaccaattaaactttattacaatggaccgatgtttagatatgaacgtaagcaaaaagggcgctatcgtcaatttaatcaatttggtgtagaagctattggtgctgaaaatcctagcgtagatgcagaagtattagctatggttatgcatatttatcaatcatttggattaaaacatttaaagcttgttattaatagtgtaggggatatggcgtctcgaaaagaatataacgaagcgttagtgaaacactttgaaccagtaattcatgaattttgttcagattgtcaatcacgtttgcatacaaatccgatgcgaattttggattgtaaagttgaccgtgataaagaagcgattaagactgcacctagaatcactgatttcttaaatgaggaatctaaggcatattatgaacaagtaaaagcttatttagatgatttaggtattccatatattgaagatcctaacttagttcgtggattggattattatacacatacagcatttgaattaatgatggataatcctaactatgatggtgccattacaacgctttgtggtggtggccgttataatggtttattagaattgctagatggtccaagtgaaacaggtattggttttgcgctaagtatagaacgattattgcttgcacttgaagaagaaggtatcgaattagatattgaagaaaacttagatttattcattgttacaatgggtgatcaagcagatcgatatgctgtgaagttattaaatcatttgagacataatggtattaaagcagataaagactacttacagcgtaaaattaaaggacaaatgaaacaagcagaccgtttaggtgccaagtttacaatcgttattggtgatcaagaattagaaaataataaaatcgatgttaaaaatatgacaactggtgaatctgaaacaattgaattagacgcattagtcgaatattttaagaagtag

SEQ ID NO: 350 - DNA, 1293 bp, Staphylococcus aureus
atgtttgtcgatcaagtcaaaatatctcttaaagccggtgatggtggtaatggtattaccgcatatagaagagaaaaatatgtaccatttggtggaccagctggcggtgacggtggtaaaggtgcttcagtcgtatttgaagtggatgaaggtttaagaacgttattagattttagatatcaacgtcattttaaagcaagcaaaggtgaaaatggccaaagtagtaatatgcatggtaaaaatgcggaagatttagtattaaaagttccacctggtacaattattaaaaatgttgaaacagacgaagtgttagcagatcttgttgaagatggtcaaagagctgtagtagcgaagggcggtcgaggtggccgaggtaattcacgttttgcaacacctagaaaccctgcacctgacttcagtgaaaaaggtgaaccaggtgaggaattagatgtatctttagaattgaaattattagctgatgtaggattagtaggtttccctagtgtgggtaaatcgactttattatctatcgtttcaaaagctaagcctaaaattggggcatatcattttacaacgattaaaccaaatctaggtgttgtttcaacgcctgatcaacgtagttttgttatggcagatttaccaggtttaattgaaggtgcatctgatggcgttggattaggacatcaatttttaagacatgtagagagaacaaaagttattgttcacatgattgatatgagcggttctgaaggtagagaacctattgaagattataaagtcattaatcaagaattagctgcgtacgagcaacgtttagaagatagacctcaaatcgtagtagctaacaagatggatttacctgaatcacaagataatttaaacttgtttaaagaagaaattggcgaagatgtgccagttattccagtttcaacaataacgcgtgataatattgatcaattattatatgcaatagcagataaattagaagaatataaagatgttgacttcacagttgaagaagaggagtcagttggcattaaccgagtattatataaacatacaccgtcacaagataaatttacaatttcaagagatgatgatggtgcttatgtggtaagtggtaatgctattgaaagaatgtttaaaatgactgactttaacagtgatccagcagtacgtcgatttgctcgtcaaatgcgttcgatgggtattgatgatgcacttagagaacgtggttgtaaaaatggtgatatcgttagaattcttggcggagaatttgaattcgttgaatag

SEQ ID NO: 351 - DNA, 603 bp, Staphylococcus aureus
atgtacgcgtatgtcaaaggtaagttaacacatttatatcctacacacgtagttgttgaaactgctggtgttggttatgaaattcaaacaccaaattcttatcgttttcaaaagcatctagatcatgaagttttaattcgtacatctttaattgttcgtgaagatgcacaattattgtatggatttagtagtgaagaagagaaagatatgttcttgagtttaattaaagttactggtattggtccgaaatcagctttagctattttagcgacaagtacgcctaatgaagtaaaacgtgccattgaaaatgaaaatgatacgtatttaactaaattcccaggaattggtaagaaaacggcaagacagattgtcttagatttaaaaggtaaagtgaaaatcactgaagaagatagcgattcattattacaagtagacgctacttcgacggtgcaagatcaattcgtgcaagaagcaatgttagcgttagaagcattaggttattctaaacgagagcttgcaaaagttgagaaaacgttaaataaaaataaatatgactcagttgatgaagctgttaaggcaggtcttcaattagttgtatcttaa

SEQ ID NO: 352 - DNA, 1005 bp, Staphylococcus aureus
atgaatgagcgtatggttgatcaatcaatgcatagtgaagaaactgatttcgaattgtcgcttagacctacgagattacgacaatatattggtcaaaattcaataaaaagtaatttagaagtatttattaaagcggctaaacttcgtcatgaaccattagatcatgtattgctttttggcccccctggattaggtaagacaacattatctaatatcattgccaatgaaatggaagttaatatacgtacagtatcagggccttcattagaaagacctggtgatttggctgcaattttatcaggacttcaacctggagatgtattgtttattgatgaaatacacagactgagtagtgttgttgaagaagtgttataccctgcaatggaagatttctttttagatattatcattggtaaaggcgatgaggctagaagtatccgtatcgacttacctccattcactttggtaggtgcaacaacgcgagctggcagcttaacaggtccactaagggatcgatttggtgtgcacttaagattagaatattataatgaatcagatttaaaagaaatcattattagaacagctgaggttttaggcacaggtattgatgaagaaagtgccattgaacttgctaaacgttctagagggactccaagagtagcaaatcgactattgaagcgggtaagagacttccagcaagtgaatgaagatgaacaaatatacattgaaacaacgaagcacgcattaggtttacttcaagttgatcaacacggactagattacattgatcataaaatgatgaactgtattattaagcagtataatggtggacctgttggtttagatacgattgccgtaacaattggtgaagaacgtattacaattgaggacgtttatgagccatttcttattcagaaaggctttttagaacgtacgccacgtggcagaaaagcaacaccattagcttatgaacattttgcaaagtcgaatgaggagagaggataa

SEQ ID NO: 353 - DNA, 309 bp, Staphylococcus aureus
atgtttgctattattgaaacaggtggaaaacaaatcaaagtagaagaaggtcaagaaatcttcgttgaaaaattagacgtaaacgaaggagatacttttacatttgataaagtattatttgtaggtggagattcagttaaagttggagcgccaacagttgaaggtgcaacagttactgctactgttaataaacaaggtcgcggtaaaaaaatcactgtattcacatacaaacgtcgtaaaaattcaaaacgtaaaaaaggccatcgtcaaccatacactaaattaacaatcgataaaatcaacgcgtaa

SEQ ID NO: 354 - DNA, 300 bp, Staphylococcus aureus
gtgtggtgcatcacgatggtgaaaatagacttacaattcttcgcatctaaaaaaggggtaagttctacaaaaaacggacgtgactctgaatcaaaacgcttaggtgctaaacgtgctgacggtcaattcgtaacaggtggttcaattttatatcgccaacgtggtactaaaatttaccctggtgaaaatgtaggtcgtggtggcgatgatacattattcgctaaaatcgacggcgttgttaaattcgaacgtaaaggtcgcgacaaaaaacaagtttctgtatatgcagtagctgaataa

SEQ ID NO: 355 - DNA, 2631 bp, Staphylococcus aureus
atggaaatgaaaccaaaatatgatcctcgtgaagttgaagcgggacgttatgaagaatgggtaaagaatggttattttaaaccgtcagaagataaatcaaaagaaacatatacaattgttatcccgccaccaaatgtaactggtaaattacatttaggacatgcatgggatacgactttacaagatatcattacacgtatgaaacgtatgcaaggatacgatacgttatacttaccaggtatggatcatgctggtattgcgacacaggcaaaggtagaagctaaattaaatgaacaaggaataactagatatgatcttggtcgtgaaaagtttttagaacaggcatgggattggaaagaagagtatgcgtcatttattcgtgcgcaatgggctaaattaggtctaggtttagattatagtagagaacgttttactttagatgaaggtttaagtaaagcagttaaaaaagtttttgttgatttatacaataaaggaattatttatcgtggcgaacgtattataaattgggatcctaaagcacgtacagctttatctgatattgaagtaatacatgaagatgttcaaggtgcgttttatcattttaaatatccttacgctgatggtgaaggttttattgaaattgcaacaacaagaccagaaacgatgttaggtgatacagcgattgttgttaaccctaatgacgaacgatacaaagatgtaatcggtaaaactgttatattaccaatcgtaggacgcgaactgcctattttagcagatgagtatgttgatatagacttcggttctggtgctatgaaagtgacaccagcacatgaccctaatgattttgaaattggtcaaagacatcaattagaaaatattatcgttatggatgaaaatggtaaaatgaacgacaaagcgggtaaatatgaaggtatggaccgttttgattgtcgtaaacagctagttaaagatttaaaagaacaagatttagttatcaagattgaagatcattttcattctgtaggtcattcagaacgatctggcgctgttgttgaaccatatttatcaacacaatggtttgtgcgcatggaagacttagcgaaacgttcattagataaccaaaaaacagatgatcgtattgatttttatccgcaacgtttcgaacatacatttaaccaatggatggaaaatattagagattggacgatttcaagacaattatggtggggtcatcaaattccggcttggtatcataaagaaacaggcgaaatatatgttggagaagaagcgccaactgatattgaaaattggcaacaagatgaagatgtattagatacgtggttctcaagtgctttatggcctttctctacgttaggttggcctgatttagaaagtgaagactttaaacgatactacccaacaaatgccttagttacaggttacgatattatctttttctgggtcgcacgcatgatattccaaggcttagaatttacagatcgtcgtccatttaatgatgtattattacacggtttagttcgtgctgaagacgggcgtaagatgagtaaatcattaggtaatggtgtggatccaatggatgttattgacgaatacggtgctgatagcttgcgttacttcttagcaacaggttcatctccaggacatgatttaagatactcaactgaaaaagttgagtcagtgtggaactttatcaataaaatctggaatggggcacgtttcagtttaatgaatatcggtgaagactttaaagttgaagatatcgatttaagtggtaacttatcattagcagataaatggattctaacacgtttaaatgaaacgattgcaacagttactgatttaagtgacaaatatgaattcggcgaagttggacgtgcattatataatttcatttgggatgatttctgtgattggtacattgaaatgagtaaaattccaatgaatagtaatgatgaagaacaaaaacaagttacacgttcagtattgagttatactttagacaatattatgagaatgctacatccattcatgccatttgtaacagagaaaatatggcaaagtttaccacatgaaggtgacacaattgttaaagcttcatggccagaagtgcgtgaatcattgatttttgaagaaagtaaacaaacaatgcaacaacttgttgaaatcattaaatctgtaagacaatcacgtgtagaagtaaatacgccattgtctaaagaaatacctattttaattcaagctaaagataaagaaattgaaacaactttatcacaaaacaaagattatttaatcaaattctgtaatcctagtaccttaaatattagcactgacgtggaaattcctgagaaagcaatgacatcagttgtaattgcaggtaaagtggtattaccattagaagggctaattgatatggataaggaaatcagccgtttggaaaaagaattagctaaacttcaaagcgaattagatagagtagataaaaagctctctaatgaaaactttgtaagtaaagcacctgaaaaggttataaatgaagaaaaacgtaaaaaacaagattatcaagaaaaatatgatggtgtgaaggcaagaattgaacaattaaaagcatag

SEQ ID NO: 356 - DNA, 1263 bp, Staphylococcus aureus
atgtttaaattcaatgaagatgaagaaaatttgaaatgctctttctgcggaaaagaccaagatcaagtaaaaaaacttgtagcaggaagtggtgtatatatttgtaatgagtgtattgaattatgctcagaaatcgtcgaagaagaattagctcaaaacacttctgaagcgatgacagaattacctactcctaaagaaattatggatcatttaaacgaatatgttattggtcaagaaaaagctaaaaaatctttagctgtagctgtttataaccactataagcgtattcaacaattaggaccaaaagaagatgatgttgaattacaaaaaagtaacattgcattaattgggccaacaggtagtggtaaaacattattagctcaaacattagccaagacgttgaatgtaccatttgcaattgcagatgcgacaagtttaactgaagctggttatgtaggcgatgatgttgaaaatatcttgttgagattaattcaagcagctgactttgacattgataaagccgaaaaaggtattatttatgtagatgaaattgataaaattgcacgtaaatctgaaaacacatctataacacgtgacgtttcaggtgaaggtgttcaacaagcattgcttaaaatcttagaaggtacgactgcaagtgttccgccacaaggtggacgcaaacatccaaaccaagaaatgattcaaattgatacaacaaatatcttatttattcttggtggtgcctttgatggtattgaagaagtgattaagcgccgtcttggtgaaaaagttattggtttctcaagcaatgaagctgataaatatgacgaacaagcattattagcacaaattcgcccagaagatttgcaagcctatggtttgattcctgaatttatcggacgtgtgccaattgtagctaatttagaaacattagatgtaactgcgttgaaaaacatcttaacgcaacctaaaaatgcacttgtgaaacaatatactaaaatgctggaattagatgatgtggatttagagttcactgaagaagctttatcagcaattagtgaaaaagcaattgaaagaaaaacaggtgcgcgtggtttacgttcaatcatagaagaatcgttaatcgatattatgtttgatgtgccttctaacgaaaatgtaacgaaggtagttattacagcacaaacaattaatgaagaaactgaaccagaactatacgacgcagaaggcaatttaattaataatagtaaaacatcagcttaa

SEQ ID NO: 357 - DNA, 591 bp, Staphylococcus aureus
atgaaagttaatcctaataatattgaattaatcattagtgcagtaaaagaagaacaatatccagaaacagaattgtctgaagttgcactgagcggtcgatctaatgtaggtaagtctacatttatcaatagtatgattggcagaaaaaatatggcacgtacatcacagcaacccggcaaaacgcaaacgttaaatttttataatatagatgaacaacttatttttgtggatgttccagggtatggatatgctaaagtaagtaaaacacaacgtgaaaaatttgggaaaatgattgaggaatatataactaagagagagaatttgcaattagttattcaattagttgatttaagacatgatccaacacaagatgatatcttaatgtacaattatttgaaacattttgatattcctactttagttatatgcactaaagaagacaaaattccaaaaggtaaagttcaaaagcatattaaaaatattaagacacaattagatatggacccagacgatacaattgtaagttattcatcaattcaaaataataaacaacaacaaatatggaatttaattgaaccgtatatttcatag

SEQ ID NO: 358 - DNA, 519 bp, Staphylococcus aureus
atagcaaaagatcaaactcaaatcaatgacaaaattcgtgcaaaagaattacgtttaatcggtcaagatggtgaacaaattggtgttaaatcaaagcgtgaagctttagaaatggctgaacgtgtagatttagacttagtggtcgttgcaccgaatgcgaaaccaccagttgcaagaattatggattacggtaaattcaaattcgaacaacagaaaaaagaaaaagaaatgaaaaagaaacaaaaaattatcaatgttaaagaaattcgtttaagtccaacaattgaggaacatgatttccaaactaagttgaaaaacggacgtaaattcttaactaaaggcgataaatgtaaagtatctattcgtttcagagggcgtgccattacgcataaggaaattggtcaacgtgtgctagaaaaatatgcagatgaatgcaaagatatagcaacagttgaacaaaaacctaaaatggacgggcgtcaaatgtttatcatgttagcgccaacagctgaaaaataa

SEQ ID NO: 359 - DNA, 357 bp, Staphylococcus aureus
atgccacgagttaaaggtggaacagtaacaagagcgcgtcgtaaaaaaacgattaaattagctaaaggttacttcggttcaaaacatacattatacaaagtagctaagcaacaagtaatgaaatcaggtcaatatgctttccgtgaccgtcgtcaacgtaaacgtgacttccgtaaattatggattacacgtatcaacgcagcagctcgtcaacatgaaatgagctactcacgtttaatgaacggtttgaaaaaagctggtatcgacattaaccgtaaaatgttatcagaaatcgcaatttctgacgaaaaagcatttgctcaattagtaactaaagctaaagatgctttaaaataa

SEQ ID NO: 360 - DNA, 1401 bp, Staphylococcus aureus
atgggacgacaagccttcgaattcggcttaagaccaaaggatcaattcaaagttatgcaacactttgatttaaatacgaatcatttagaggtattgaatcgactgtatacaccgctaattggaacgcaagcagtgggtttatatcattttatgactcaattcgttaaagacagtcataatgaaacattgattctttctcattatatttttatgaatgaacttaaaattaatttactagagtttagacaacaaatggacttacttgaagcgattggattgttaaaggcgtttgtcaaacatgatgaacaagaaacacaatttgtttaccaattaattcaaccgccttcagcacatttattttttaatgatccaatgttgtcaatctttttatatagtgaagtcgagcatcgtcgatttcatgagttgaagaaatactttgagtatcaacaaattgatttgagtgaatttaaacaggtaacaagacaatttactgatgtttttaaagtgccgtctacaaaaatagatatcgatacaagtgatattccgattaatgaaccgtaccaaggtatcgatttatcaaatgaatcttttgactttgaaatgttgagacaaatgttaggtaaacattttattagtcaagacattgttaccaaagatgcaaagcgtttaattacacaactcgcgactttatatggtttaacagcagatggcatgaagcatgttattttaaattcaattacaagtggacaacagttatcctttgaagaaatgcgtaaacaagcacgctcgtattatttaatggaacacgaaaatcaaatgcctaaattacaggtgaaatctcctgctacatcatcttcgacgggcaaatcttcagaagtgaatccaaagccacaaagtgatgaatggtttgagttacttgaacaaacgagtccaattgatatgttagcttcttggtctgaatcagaaccaactatatcgcaaaagacaatggttgaagaattaattgaacgtgaaaaaatgtcttttggcgtcattaatattttgttgcaatttgtcatgttaaaagaagatatgaaacttcctaaagcgtatattttggaaatagcatcaaattggaagaaaaaaggtattaagacagctaaagaagcatataattacgctaaaaaagttaatcaacctaaaaatgagggttctagcggaaattaccaaaagcgtggttcatactatgggcaacgtaatcgtatttcaaaagaaaaaacacctaaatggttagaaaatagagataaacctagtgaagaagattcggctaaagataatagcgtagatgatcaacaattagagcaagatcgacaagcatttctagataaattatctaaaaaatgggaggaggacagtcgataa

SEQ ID NO: 361 - DNA, 921 bp, Staphylococcus aureus
atgaagcaatttaaaagtataattaacacgtcgcaggactttgaaaaaagaatagaaaagataaaaaaagaagtaatcaatgacccagatgttaagcaatttttggaagcgcatcgagctgaattaacgaatgctatgattgatgaagacttaaatgtgttacaagagtataaagatcaacaaaaacattatgacggtcataaatttgctgattgtccaaatttcgtaaaggggcatgtgcctgagttatatgttgataataaccgaattaaaatacgctatttacaatgcccatgtaaaatcaagtacgacgaagaacgctttgaagctgagctaattacatctcatcatatgcaacgagatactttaaatgccaaattgaaagatatttatatgaatcatcgagaccgtcttgatgtagctatggcagcagatgatatttgtacagcaataactaatggggaacaagtgaaaggcctttacctttatggtccatttgggacaggtaaatcttttattctaggtgcaattgcgaatcagctcaaatctaagaaggtacgttcgacaattatttatttaccggaatttattagaacattaaaaggtggctttaaagatggttcttttgaaaagaaattacatcgcgtaagagaagcaaacattttaatgcttgatgatattggggctgaagaagtgactccatgggtgagagatgaggtaattggacctttgctacactatcgaatggttcatgaattaccaacattctttagttctaattttgactatagtgaattggaacatcatttagcgatgactcgtgatggtgaagagaagactaaagcagcacgtattattgaacgtgtcaaatctttgtcaacaccatactttttatcaggagaaaatttcagaaacaattga

SEQ ID NO: 362 - DNA, 2631 bp, Staphylococcus aureus
gtgaataaattagtattaatcgatggtaatagcttaagttttagagctttttatgcattacctttgttatcaaacaaagcaggcattcataccaatgcagtatatggttttgcaatgttactagagaagattttaaaagaagaaaagccaaatcattttttagtagcgtttgatgcaggtaaaacaactttcagacatgaaaaatatagtgaatataaaggtggacgccagaaaacgccgcctgaactaagtgagcaatttccttatatacgccaattattagatgcttatcatattaaacgttatgaattagataactatgaggcagatgatattatcggaactttaagtaaagaagcagataaagcgggctttcagacaattattataacgggagaccgagatttaacacaacttgcaacggataatgtaaccatttattacactaaaaaaggtgttactgatgttgatcattatacacctgactttattgcggaaaaatacaacgggttaacacctaatcaaattattgatatgaaaggattaatgggagatacttctgataatataccaggtgttgcaggtgttggagagaaaacagcaataaaattgctaaaccaatttgacacagtagaaggtgtctatgaacatttagatgaaatttcaggtaaaaagttaaaagaaaaacttcaaaatagcaaagaagatgcattaatgagtaaagaattagcaacgattaatgtagatagtccgattgaagtaaaacttgaagatacgttaatgactcatcaagatgaacaacaagaaaaaatcgaattgtttaagaagttagaattcaaacaattgttgtctgacattgatcaatcagcaagcgttgaagatgcaatagaaaagacatttgaaattgaaacgtcttttgataatattgattttacttcattgaaagaagcggccatccatttcgaattagacggtggtaactatttgcgaaataatattttaaaattctctttatttacaggtgagaaacatattgtaattaatgcggatgacataaataattatgccgaactagtttcatggttagaaaatccgaatacgaaaaaagtcgtatatgatgctaaaaaaacatatgtagcatcacatagattgggaattgatattcaaaatatttctttcgatattatgttggccagttatataattgatccatctcgtacgattagtgatgttcaatcagttgtttcattgtacggtcaaagttttgtgaaagacgatgtaagtatatatggaaaaggtaagaaatttaaggtacctgaagatgatgttttaaatccatatgttgcttctattactgatgcaatttactttgcgaaaccaaatatggataaacaattagaagaatacaatcaggtagaactcttagctgatttagagctaccgctagctaagattttaagtgaaatggaagaaattggtatatttacagatgttcatgatttagaagaaatggaaaaagaaattcaagaaaaattagacgtcttgattcgaaatatccatgatgcagctggtgaagattttaatataaattctcctaaacaattaggtgttgtattgtttgagacattacaattacctgttattaaaaagacgaaaacaggatattctactgctgtagatgtcttagagcaattgcaaggtgaacatcctatcattgattatattttagaatatcgtcaattatctaagttacagtctacttatgttgaaggattgcaaaaggtaattagtgatgatcaacgtatccatacacgttttaaccaaactttagcgcaaactggacgtttatcaagtgtagatcctaatttacaaaatattccggttagacttgaagaagggcgtaaaataagaaaagcctttaaaccaacttcaaaagatagcgttatattatcagcagattattctcaaattgaattgcgtgtattagcacacattacacaagatgagagtatgaaagaagcatttatcaacggcgatgatattcatacagcaactgctatgaaagtatttggtgtagaggctgatcaagtcgatagtttaatgcgtcgtcaagcaaaagcggttaactttggaattgtttatgggataagtgattatggtttaagtcaaagtttaggtattactcgtaaaaaagcaaaagcattcattgatgattatttagctagtttcccaggtgtgaaacaatatatgtctgatattgtaaaagatgccaaagctttaggttacgtggaaacattgctacatcgtcgacgctatattcctgatattacgagtcgtaactttaatttacgcggctttgctgaacgtactgctatgaatacgccaatacaaggcagtgctgcagatatcattaaactggcaatggttaaatttgcacaaaaaatgaaagagacaacatatcaagctaaactattattacaagtacacgatgaattaatttttgaagtacctaagtcagaagtagattcatttagtgaatttgtagaagagataatggaaaatgcattgcaattagatgttccattaaaagtagactcaagttatggtgcaacttggtatgatgcaaaataa

SEQ ID NO: 363 - DNA, 624 bp, Staphylococcus aureus
atgccgaaagttattggtctaacaggtggaatcgcctcaggaaaatcaacagtatcagaactcttatccgtattcggttttaaagtagtagatgctgataaagcagccagggaagctgttaaaaaggggagtaaaggtttagctcaagtacgagaagtctttggtgatgaagcaattgatgaaaatggtgagatgaatcgtcgttatatgggtgatttagtgtttaaccatccagaaaaacgcttagaattaaatgctatcatacatcctatcgtgcgagatattatggaagaagaaaagcaagaatatttaaaacaaggatataatgtaatcatggatattccattattatttgaaaatgaattggaaaatacagtagacgaagtgtgggttgtatacacttctgaaagtatacaaatggatcgtttaatgcaacgtaataatctgtcattagaagatgcgaaagcacgtgtctatagccaaatttctattgataaaaaaagccgaatggccgatcatgttatcgataatttaggggataaacttgaattaaaacaaaaccttgagagattgttagaagaagaaggttatattgaaaagccgaattacggagaagaagattaa

SEQ ID NO: 364 - DNA, 924 bp, Staphylococcus aureus
atgaatgctgccgtaagagcagttgttcgtacagcaatttacaatgaaattgaagtttatggtgtgtatcatggttaccaaggattgttaaatgatgatattcataaacttgaattaggatcagttggggatacgattcagcgtggaggtacattcttgtattcagcaagatgtccagagtttaaggagcaagaagtacgtaaagttgcaatcgaaaacttacgtaaaagagggattgagggccttgtagttattggtggtgacggtagttatcgcggtgcacaacgcatcagtgaggaatgcaaagaaattcaaactatcggtattcctggtacgattgacaatgatatcaatggtactgattttacaattggatttgacacagctttaaatacgattattggcttagtcgacaaaattagagatactgcgtcaagtcacgcacgaacatttatcattgaagcaatgggccgtgattgtggagatctagcattatgggctggattatcagttggtgctgagacaattgtagttccagaagtgaaaacagatattaaagaaatagctgataaaattgaacaaggtattaaacgtggtaagaaacactcaatcgttcttgtagcagaaggttgcatgactgcgcaagattgtcaaaaagaattatcacaatacatcaatgttgataatagagtgtctgtgttaggtcacgttcaacgtggtggtagcccaacaggtgcggatagagttttagcatcacgtttaggtggatatgcggtagacttattaatgcaaggtgaaacagctaagggtgttggaattaagaacaataaaattgtagcaacatcttttgatgaaatttttgatggtaaagatcataaatttgattatagtctatatgaacttgctaacaagttatctatataa

SEQ ID NO: 365 - DNA, 1758 bp, Staphylococcus aureus
atgagaaaaactaaaattgtatgtacaattggaccagcttcagaatcagaagaaatgattgagaaattaatcaatgctggtatgaacgttgcacgattaaacttttcacatggtagtcatgaagagcataaaggtagaattgatacaattcgtaaagtagctaaaagattagacaaaattgtagcaattttattagatacgaaaggtccagaaattcgtacgcataatatgaaagacggtatcattgaacttgaacgtggtaacgaagttattgttagcatgaatgaagttgaaggaacacctgaaaagttctcagtaacatatgaaaacttaattaacgatgttcaagtaggttcatacattttacttgatgatggcttaattgaattacaagttaaagatattgaccatgctaaaaaagaagttaaatgtgatattttaaactctggtgagcttaaaaacaaaaaaggtgttaacttacctggtgtaagagtaagtttacctggtattacagaaaaagatgctgaagatatccgtttcggtattaaagaaaatgttgacttcattgcagcaagtttcgtacgtcgtcctagtgatgttttagaaattcgtgaaattttagaagaacaaaaagctaacatttcagtattccctaaaattgaaaaccaagaaggtattgataatattgcggaaattcttgaagtgtctgatggtttaatggttgcacgtggtgacatgggtgttgaaattccacctgaaaaagtaccaatggttcaaaaagatttaatcagacaatgtaacaaattaggtaaaccagttattacagctacacaaatgttagattctatgcaacgtaacccacgtgctacacgtgcagaagctagtgacgttgccaacgcaatctatgatggtacagatgcagtaatgttatctggtgaaactgctgctggtttatatcctgaagaagctgttaaaacaatgagaaatattgctgtatcagctgaagcagcccaagattataaaaagttattgtcagatcgtactaaattagttgaaacttcattagtgaatgctatcggtatttcggttgcacatacagctttaaacttaaatgttaaagcaattgtagctgctactgaaagtggttcaacggcacgtactatctctaaatatcgtccacattcagacattattgcggtgactccaagtgaagaaacagcacgtcaatgttcaattgtttggggagttcaacctgtagttaaaaaagggcgtaagagtacagatgcattgttaaacaatgcagttgcaacagctgttgaaactggtagagtatctaatggtgatttaatcattattactgctggtgtaccaactggtgaaactggaactactaatatgatgaaaatccacctagttggtgacgaaattgctaatggtcaaggtattggacgtggatcagttgttggtactacgttagttgctgaaactgttaaagatttagaaggtaaagatttatctgacaaagttatcgttactaactcaatcgatgaaacgtttgtaccttatgtagaaaaagctttaggattaattacagaagaaaatggtattacatcaccaagtgcaattgttggtttagaaaaaggtattccaacagttgtaggtgtagaaaaagctgttaaaaacataagcaataacatgttagttacgattgatgctgctcaaggtaaaatctttgaaggatatgcaaacgtactataa

SEQ ID NO: 366 - DNA, 858 bp, Staphylococcus aureus
atgtttaaagatttttttaatcgaacaaagaaaaagaaatatcttacagtacaagactctaaaaataatgatgtgcctgcaggtattatgactaagtgtccaaagtgtaagaaaattatgtacacaaaagaattagctgaaaatttaaatgtgtgctttaattgtgatcatcatattgctttaactgcgtataaacgtatagaagcaatttctgatgaaggatcatttacagaattcgataagggaatgacctctgcgaatccattagattttccaagttatttagaaaaaattgaaaaggaccaacaaaagacaggtcttaaagaagcagttgtgactggtacagcgcaactagatggtatgaaatttggcgttgctgtcatggattcacgttttagaatgggaagtatgggatcggttatcggtgaaaagatatgtcgcatcattgattactgcactgagaaccgtttaccatttattcttttctctgcaagtggtggtgcacgtatgcaagaaggtattatttccttgatgcaaatgggtaaaaccagtgtatctttaaaacgtcattctgacgctggactattatatatatcatatttaacacatccaactactggtggtgtatctgcaagttttgcatcagttggtgatataaatttaagtgagccaaaagcgttgataggttttgcaggtcgtcgagttattgaacagacaataaacgaaaaattgccagatgatttccaaactgcagaatttttattagagcatggacaattggataaagttgtacatcgtaatgatatgcgtcaaacattgtctgaaattctaaaaatccatcaagaggtgactaaataa

SEQ ID NO: 367 - DNA, 945 bp, Staphylococcus aureus
atgttagattttgaaaaaccactttttgaaattcgaaataaaattgaatctttaaaagaatctcaagataaaaatgatgtggatttacaagaagaaattgacatgcttgaagcgtcattggaacgagaaactaaaaaaatatatacaaatctaaaaccatgggatcgtgtgcaaattgcgcgtttgcaagaaagacctacgaccctagattatattccatatatctttgattcgtttatggaactacatggtgatcgtaattttagagatgatccagcaatgattggtggtattggctttttaaatggtcgtgctgttacagttattggacaacaacgtggaaaagatacaaaagataatatttatcgaaattttggtatggcgcatccagaaggttatcgaaaagcattacgtttaatgaaacaagctgaaaaattcaatcgtcctatctttacatttatagatacaaaaggtgcatatcctggtaaagctgctgaagaacgtggacaaagtgaatctatcgcaacaaatttgattgagatggcttcattaaaagtaccagttattgcgatagtcattggtgaaggtggcagtggaggtgctctaggtattggtattgccaataaagtattgatgttagagaatagtacttactctgttatatctcctgaaggtgcagcggcattattatggaaagacagtaatttggctaaaattgcagctgaaacaatgaaaattactgcccatgatattaagcaattaggtattatagatgatgtcatttctgaaccacttggcggtgcacataaagatgttgaacagcaagctttagctattaaatcagcgtttgttgcacagttagattcacttgagtcattatcacgtgatgaaattgctaatgatcgctttgaaaaattcagaaatatcggttcttatatagaataa

SEQ ID NO: 368 - DNA, 1824 bp, Staphylococcus aureus
atggcacatttatctgtgaaattgcggcttttaatactagcattaatcgattcactgatagtgacattttcagtattcgtaagttattacattttagaaccgtatttcaaaacatattctgtcaaattattaatattggcagctatatcactattcatatcgcatcatatttcagcatttatttttaatatgtatcatcgagcgtgggaatatgccagtgtgagtgaattgattttaattgttaaagctgtgacgacatctatcgttattacgatggtggtcgtgacaattgttacaggcaatagaccgttttttagattgtatttaattacttggatgatgcacttgattttaataggtggctcaaggttattttggcgtatttatcggaaataccttggaggtaagtcatttaataagaagccaactttagttgttggtgctggtcaagcaggttcaatgctgattagacaaatgttgaaaagtgacgaaatgaaacttgaaccggtattagcagtcgatgatgacgaacataaacgcaatatcacaattactgagggtgtaaaagtccaaggtaaaattgcggatattccagaactagtgaggaaatataagattaaaaaaatcatcattgcaattccaactattggtcaagagcgtttgaaagaaattaataatatttgccatatggatggcgttgagttattgaaaatgccaaatatagaagacgtcatgtctggtgagttagaagtgaatcaactgaaaaaagttgaagtagaagatttactaggcagagatcctgttgaattagatatggatatgatatcaaatgaattgacgaataaaactattttagttacgggtgcaggtggttcaataggatcagaaatttgtagacaagtttgtaatttctatccagaacgtattattctacttggccatggtgaaaacagtatttatttaatcaatcgtgaattgcgaaatcgcttcggaaaaaatgttgatatcgttcctattatagcggatgtgcaaaatagagcgcgtatgtttgaaattatggaaacgtataaaccatacgcagtttatcatgcagcagcacacaagcacgtgccgttaatggaagacaaccctgaagaagcagtacataataatattttaggtacgaaaaatactgctgaagctgctaaaaatgcagaggtaaagaaattcgttatgatttctacggataaagccgttaatccgcctaatgtcatgggagcttcaaagcgaattgcagaaatgattattcaaagtttaaatgatgaaacgcatcgaacaaattttgttgcagtgagatttggtaatgtacttggatcgagaggatctgtgattccacttttcaaaagtcaaattgaagaaggtgggccagttactgtgacacatcctgaaatgacacgttactttatgacaattcctgaagcttctagactagttttgcaggcaggggcattagcagaaggtggcgaagtatttgtgctagatatgggagaaccagtgaaaattgtagatttggcacgtaatttaattaagctaagtggtaaaaaagaagacgacatacgcattacttatacagggattagacccggcgaaaaaatgtttgaagagcttatgaataaagatgaggttcatcctgaacaagtatttgaaaaaatttatcgtggcaaagtacaacatatgaaatgtaatgaagttgaagcgattattcaagacatcgtcaatgactttagtaaagaaaaaattattaactatgccaatggcaaaaagggagataattatgttcgatga

SEQ ID NO: 369 - DNA, 3198 bp, Staphylococcus aureus
atggtggcatatttaaatattcatacggcttatgatttgttaaattcaagcttaaaaatagaagatgccgtaagacttgctgtgtctgaaaatgttgatgcacttgccataactgacaccaatgtattgtatggttttcctaaattttatgatgcatgtatagcaaataacattaaaccgatttttggtatgacaatatatgtgacaaatggattaaatacagtcgaaacagttgttctagctaaaaataatgatggattaaaagatttgtatcaactatcatcggaaataaaaatgaattcaatggaaaatgtttcatttgaactattgcaacaattttcatcgaatttgattatcatttttaaaaatgttgcagacgaacatcgtgacattgttcaagtttttgattcgcatgaagatacgtatttagatcatcaaagtgttttagttcagggtataaagcacgtatggattcaaaatgtttgttaccaaacacgtcaagatgccgatacgatttctgcattagcagctattagagacaatgcaaaattagacttaattcatgatcaagaagattttggtgcacattttttaactgaaaaggaaattaaacaattagatattaaccaagaatatttaacgcaggttgatgttatagctcaaaagtgtaatgcagaattaaaatatcatcaatctctacttcctcaatatcagacacctaacgatgaatcagctaaaaaatatttgtggcgtgtcttagttacacaattgaaaaaattagaacttaattatgacgtctatttagagcgattgaaatatgagtataaagttattactaatatgggttttgaagattatttcttaatagtaagtgatttaatccattatgcgaaaacgaatgatgtgatggtaggtccaggtcgtggttcttcagctggctcactggtcagttatttactaggtattacaacgattgatcctattaaattcaatctattatttgaacgttttttaaacccagaacgtgtaacaatgcctgatatagatattgactttgaagatacacgccgagaaagggttattcagtacgtccaagaaaaatatggcgagctacatgtatctggaattgtgactttcggtcatctgcttgcaagagcggttgctagggatgttggacgaattatggggtttgatgaagttacattaaatgaaatttcaagtttaatcccacataaattaggaattacacttgatgaagcatatcaaattgacgattttaaaaaatttgtacatcgaaaccatcgacatgaacgctggttcagtatttgtaaaaagttagaaggtttaccaagacatacatctacacatgcggcaggaattattattaatgaccatccattatatgaatatgcccctttaacgaaaggggatacaggattattaacgcaatggacaatgactgaagccgaacgaattgggttattaaaaatagattttctagggttgagaaacttatcgattattcatcaaatcttaatacaagtcaaaaaagatttaggtattaatattgatatcgaaaagattccgttcgatgatcaaaaagtgtttgaattgttgtcgcaaggagatacgactggcatattccaattagagtcagacggtgtaagaagtgtattaaaaaaattaaagccggaacactttgaagatattgttgctgtaacttctttgtatagaccaggtccaatggaagaaattccaacttacattacaagaagacatgatccaagcaaagttcaatatttacatccacatttagaacctatattaaaaaatacttacggtgttattatttatcaagagcaaattatgcaaatagcgagcacatttgcaaacttcagttatggtgaagcggatattttaagaagagcaatgagtaaaaaaaatagagctgttcttgaaagtgagcgtcaacattttatagaaggtgcaaagcaaaatggttatcacgaagacattagtaagcaaatatttgatttgattctgaaatttgctgattatggttttcctagagcacatgctgtcagctattctaaaattgcatacattatgagctttttaaaagtccattatccaaattatttttacgcaaatattttaagtaatgttattggaagtgagaagaaaactgctcaaatgatagaagaagcaaaaaaacaaggtatcactatattgccaccgaacattaacgaaagtcattggttttataaaccttcccaagaaggcatttatttatcaattggtacaattaaaggtgttggttatcaaagtgtgaaagtgattgttgatgaacgttatcagaacggcaaatttaaagatttctttgattttgctagacgtataccgaagagagtcaaaacgagaaagttacttgaagcactgattttagtgggagcgtttgatgcttttggtaaaacacgttcaacgttgttgcaagctattgatcaagtgttggatggcgatttaaacattgaacaagatggttttttatttgatattttaacgccaaaacagatgtatgaagataaagaagaattgcctgatgcacttattagtcagtacgaaaaagaatatttaggattttatgtttcgcaacacccagtagataaaaagtttgttgccaaacaatatttaacgatatttaaattgagtaacgcgcagaattataaacctatattagtacagtttgataaagttaaacaaattcgaactaaaaatggtcaaaatatggcattcgtcacattaaatgatggcattgaaactttagatggtgtgattttccctaatcagtttaaaaagtacgaagagttgttatcacataatgacttgtttatagttagcgggaaatttgaccatagaaagcaacaacgtcaactaattataaatgagattcagacattagccacttttgaagaacaaaaattagcatttgccaaacaaattataattagaaataaatcacaaatagatatgtttgaagagatgattaaagctacgaaagagaatgctaatgatgttgtgttatccttttatgatgaaacgattaaacaaatgactactttaggctatattaatcaaaaagatagtatgtttaataattttatacaatcctttaaccctagtgatattaggcttatataa

SEQ ID NO: 370 - DNA, 1314 bp, Staphylococcus aureus
atgacacactatcattttgtcggaattaaaggttctggcatgagttcattagcacaaatcatgcatgatttaggacatgaagttcaaggatcggatattgagaactacgtatttacagaagttgctcttagaaataaggggataaaaatattaccatttgatgctaataacataaaagaagatatggtagttatacaaggtaatgcattcgcgagtagccatgaagaaatagtacgtgcacatcaattgaaattagatgttgtaagttataatgattttttaggacagattattgatcaatatacttcagtagctgtaactggtgcacatggtaaaacttctacaacaggtttattatcacatgttatgaatggtgataaaaagacttcatttttaattggtgatggcacaggtatgggattgcctgaaagtgattatttcgcttttgaggcatgtgaatatagacgtcactttttaagttataaacctgattacgcaattatgacaaatattgatttcgatcatcctgattattttaaagatattaatgatgtttttgatgcattccaagaaatggcacataatgttaaaaaaggtattattgcttggggtgatgatgaacatctacgtaaaattgaagcagatgttccaatttattattatggatttaaagattcggatgacatttatgctcaaaatattcaaattacggataaaggtactgcttttgatgtgtatgtggatggtgagttttatgatcacttcctgtctccacaatatggtgaccatacagttttaaatgcattagctgtaattgcgattagttatttagagaagctagatgttacaaatattaaagaagcattagaaacgtttggtggtgttaaacgtcgtttcaatgaaactacaattgcaaatcaagttattgtagatgattatgcacaccatccaagagaaattagtgctacaattgaaacagcacgaaagaaatatccacataaagaagttgttgcagtatttcaaccacacactttctctagaacacaagcatttttaaatgaatttgcagaaagtttaagtaaagcagatcgtgtattcttatgtgaaatttttggatcaattagagaaaatactggcgcattaacgatacaagatttaattgataaaattgaaggtgcatcgttaattaatgaagattctattaatgtattagaacaatttgataatgctgttgttttatttatgggtgcaggtgatattcaaaaattacaaaatgcatatttagataaattaggcatgaaaaatgcgttttaa

SEQ ID NO: 371 - DNA, 1662 bp, Staphylococcus aureus
atgagtgaaagtaaagaaatggtgcgtggaacctttttaattaccattagtatattaattaccaaggtattgggcgtactttttatcattccattcaactatttaattggtggacaagaaaatatggcgccgttcacatacgcttatgcaccatataatattgcaattgcagttgcgacagcaggtgtaccattagcagcttcgaaatatgttgcgaaatataatgctattggggcatataaagtaagtcagaaattttataaatcgagttttattgtaatgagtattaccggtgttttaggtttcttggtactgtatttcttagcaccttatatttctgaattaacattagctagaaacattcatgataaaaacggttggtcagtcgatgatattacttggattataagaatcattagtatggttgttatctttattcctgtattagcgacatggagagggatattccaaggttataaatctatggggccaacagcagtgtcagaagtaactgagcaaattgcacgcgtgattttcatattaatcggaagttatttagtactaaatgtctttgatggctctattttattagccaatggtattgctacttttgcagcagcagttggtgcgattattggtatattcacactctggtattactggagaaagcgtaagcataatattgatcgtatggtcgaatctgattacacagatatagatgtgtcatatggcaagatgtataaagaaattattgcttatagtataccgttcgttattgtaagtttgaattatccattatttaacttagtagatcaatttacacataacggtgctttatctttagttggtataccttcacagttacaagatatattctttaatatgctaaatatgtcaactaataaaattgtaatgattccgacatcattaagtgctggttttgcagtgagtttaattccttatattacaaaaacatttgcagaaggtcgcttacatgaaatgcatcatcaaattagaacatctattggtgtattaatgtttataactgttccagctagtattggaattatggccttggcacaaccattattcacagttttctatggttacgatccaattgttttaggtcatgaccctaaccatgatggtagtcgcttattattctattatgcgcctgtagcaatactaatttcactattaagtgtaacggcatcaatgttacaaggtatagataaacagaaattaacagtttatgttattttagcttctgtagttatcaagttagcgttaaactatccattaattatgttattccatacacctggtgcaattttaagtactagtatcgcattattatttgcaattggatgtaatttctatattcttaaaaaatatgcgaagtttaaattcagctatagttggattcattttgcaaaaatattcttgtattcatttattatgatgctaggtgtagaattagtatttttccttgcaaatctattcttagaacctactaaacttggttacttaatcattattattttaggtgttacagtaggtattctaatttacggtacaatcacaattaaaacgcgtcttgcggacgaattcttaggtgaaattcctgaaaaattaagacgtagagttaggtttttacgatga

SEQ ID NO: 372 - DNA, 696 bp, Staphylococcus aureus
atgagaatagataaatttttagcaaatatgggcgtcggtacacgcaatgaggtcaaacagttacttaaaaaaggccttgtaaatgtcaacgaacaagtaattaaatcaccaaaaacacatatagaaccagaaaacgataagataacagttcgtggagaattaatagaatacattgaaaatgtctatattatgttaaataagccaaaaggttatatatcagcaactgaagatcatcattcaaaaaccgttattgatttaatacctgaataccaacatctaaatatttttccggttggtcgtcttgataaagatacagaagggcttttattgataacgaatgatggtgattttaatcatgaattaatgagtccaaacaaacatgtttctaaaaaatatgaagttatttcagcaaatcctatcactgaagacgacattcaagcttttaaagagggtgtaacactgactgatggcaaggttaagcctgcaatattaacttatattgataatcaaacgtcacacgtaacaatttatgaaggaaaatatcatcaagttaaacgaatgtttcatagcattcaaaatgaggtattacatttaagacgtatcaaaattgctgatttagaattggacagcaatttagattcaggagaatatcgtttattaactgaaaatgattttgacaaattaaattataaataa

SEQ ID NO: 373 - DNA, 945 bp, Staphylococcus aureus
atagcaattgaatgtccagtaacaaatttggaggaagcgtatatgtatcaaacaattattatcggaggcggacctagcggcttaatggcggcagtagctgcaagcgaacaaagtagcagtgtgttactcattgaaaaaaagaaaggtctaggtcgtaaactcaaaatatctggtggcggtagatgtaacgtaactaatcgattaccatatgctgaaattattaagaacattcctggaaatgggaaatttttatatagtcccttttcaatttttgataatgaatccatcatagatttttttgagtctaggggtgttaaattaaaagaagaagatcacgggcgtatgtttccagtttccaacaaagcacaagacgtggttgatacattagtgacaactatcgaacgccaacatgtaacgattaaagaagaagaagctgttagtagaatcgaagttaatacagaccaaactttcactgtacatactcaaaataatagttatgaaagccattcgctagtgattgctacaggtggtacaagtgtccctcaaactggttcaactggtgatggttataagttcgcacaagatttaggtcataccattactgagttattcccgaccgaagttccaattacatcagctgaacctttcatcaaatccaatcgtctaaaaggtttaagtttaaaagatgttgaattgtcagtacttaagaaaaatggtaaaaaacgcatcagtcatcaaatggatatgttatttactcattttggtatcagtggtccagctgcattaagatgtagtcagtttgtttataaagaacaaaaaaatcaaaagacacagcacatttctatggcaatcgatgcatttcctgaattaaaccatgaacaattaaaacaacacatcacatcacttatcaaatcaacaattgaacgacttagtaaatatgtttaa

SEQ ID NO: 374 - DNA, 2415 bp, Staphylococcus aureus
ttgaattacaaccacaatcaaattgaaaagaaatggcaagactattgggacgaaaataaaacatttaaaacaaatgataacttaggtcaaaagaaattttatgctttagacatgtttccatatccatcaggtgctggtttacatgttggacatcctgagggctatacagcaacagatatcatttcaagatataaaaggatgcaaggttataatgtattacatccgatggggtgggatgcattcggattaccagcagagcaatatgctttagacactggcaacgacccacgtgaatttacaaagaaaaatatccaaacttttaaacgacaaattaaagaattagggttcagttatgattgggatcgtgaagttaatacaacagatccagaatactataaatggacacagtggattttcatacagttatataacaaaggtttagcatacgttgatgaagttgcagttaactggtgtccagcattaggcactgttttatctaacgaagaagtgattgatggtgtctctgaacgtggtggacatccagtttatcgtaagccgatgaaacaatgggtacttaaaatcacagaatatgcagatcaattattagcagatttagatgatttagattggcctgagtctttaaaagatatgcagcgcaattggattggacgttctgaaggggccaaagtttcatttgatgtagataatacggaaggaaaagtagaagtatttacgactagaccagacactatctatggtgcatcattcttagtcttaagtcctgaacatgcattagttaattcaattacaactgatgaatataaagaaaaagtaaaagcttatcaaacagaagcttctaaaaagtcagatttagaacgtacagatttagcaaaagataaatcaggtgtgtttactggtgcatatgcaattaatcctttatctggtgaaaaagtacaaatttggattgctgattatgtattatcaacatatggtactggagcaattatggcagtaccagcgcatgatgacagagattatgaatttgctaaaaagtttgatttgccaatcattgaagtcatcgaaggtggaaatgttgaagaagcagcatacactggtgaaggtaaacatattaattctggtgaacttgatggtttagaaaatgaagcggcaattactaaagctattcaattattagagcaaaaaggtgctggcgaaaagaaagttaattacaaattaagagattggttattcagtcgtcagcgttattggggcgaaccaattcctgtcattcattgggaagatggaacaatgacaactgttcctgaagaagagctaccattgttgttacctgaaacagatgaaatcaagccatcagggactggtgagtctccactagctaatattgattcatttgtaaatgttgtagatgaaaaaacaggtatgaaaggacgtcgtgaaacaaatacaatgccacaatgggcaggtagttgttggtattatttacgttacatcgatcctaaaaatgaaaatatgttagcagatcctgaaaaattaaaacattggttacctgttgatttatatatcggtggagtagaacatgcggttcttcacttattatatgcaagattttggcataaagtcctttatgatttgggtatcgtacctactaaagaacctttccaaaaattatttaaccaaggtatgattttaggagaaggtaatgagaagatgagtaaatctaaaggaaatgtaatcaatcctgatgatatagtacagtctcatggtgcagatactttacgtctttacgaaatgtttatgggacctttagatgctgcaattgcatggagtgaaaaaggattagatgggtctcgtcgattcttagatcgcgtatggcgtttaatggtaaatgaagatggaacattgagttcaaaaattgtaactacaaataataaatctttagataaagtttataaccaaactgttaaaaaggtaacagaagactttgaaacattaggatttaatactgctattagtcaattaatggtatttattaatgagtgttataaagttgatgaagtttataaaccttacattgaaggcttcgttaaaatgttagcacctattgcaccacatatcggtgaagaattatggtcaaaattaggacatgaagagtctattacgtaccaaccttggccaacttatgacgaagcactacttgtagatgatgaagtagaaatcgttgttcaagtaaatggtaaattgagagctaaaattaaaattgctaaagatacatcaaaagaagaaatgcaagaaattgccttatctaatgacaatgttaaagcgagtattgaaggtaaagacatcatgaaagtcatcgctgttcctcaaaaattagtcaatattgtagctaaataa

SEQ ID NO: 375 - DNA, 74 bp, Staphylococcus aureus
cgcgggatggagcagttcggtagctcgtcgggctcataacccgaaggtcggtggttcaaatccgcctcccgcaa

SEQ ID NO: 376 - DNA, 75 bp, Staphylococcus aureus
ggtctcgtagtgtagcggttcacacgccctgccctgtcacgcaggatatcgcgggttcgattcccgtcgagaccg

SEQ ID NO: 377 - DNA, 73 bp, Staphylococcus aureus
ggttcagtagctcagttggtagagcaatggattgaagctccatgtgtcggcagttcgactctgtcctgaacca

SEQ ID NO: 378 - DNA, 73 bp, Staphylococcus aureus
gcggttgtggtgaagtggttaacacatcggattgtggttccgacattcgagggttcgatccccttcagccgcc

SEQ ID NO: 379 - DNA, 71 bp, Staphylococcus aureus
gcgggtgtagtttaatggcaaaacctcagccttccaagctgatgttgtgggttcgattcccatcacccgct

SEQ ID NO: 380 - DNA, 72 bp, Staphylococcus aureus; identical to SEQ ID NO: 265

SEQ ID NO: 381 - DNA, 72 bp, Staphylococcus aureus
ggctccttggtcaagcggttaagacaccgccctttcacggcggtaacacgggttcgagtcccgtaggagtca

SEQ ID NO: 382 - DNA, 89 bp, Staphylococcus aureus
ggagagttgtccgagttggccgaaggagcacgcctggaaagtgtgtaggcgccacaagcgtctcgagggttcgaatccctcactctccg

SEQ ID NO: 383 - DNA, 72 bp, Staphylococcus aureus; identical to SEQ ID NO: 381

SEQ ID NO: 384 - DNA, 73 bp, Staphylococcus aureus
ggtctcgtagtgtagcggttaacacgcctgcctgtcacgcaggagatcgcgggttcgattcccgtcgagaccg

SEQ ID NO: 385 - DNA, 72 bp, Staphylococcus aureus
gcgggagtagttcaacttttagaacacgttccttcccggaacgaggtataggtgtaaatcctatcttccgct

SEQ ID NO: 386 - DNA, 84 bp, Staphylococcus aureus
gccggtgtggcggaattggcagacgcgcgggactcaaaatcccgttccacttgtggagtgtcggttcgaccccgaccaccggta

SEQ ID NO: 387 - DNA, 1555 bp, Staphylococcus aureus
ttttatggagagtttgatcctggctcaggatgaacgctggcggcctgcctaatacatgcaagtcgagcgaacggacgagaagcttgcttctctgatgttagcggcggacgggtgagtaacacgtggataacctacctataagactgggataacttcgggaaaccggagctaataccggataatattttgaaccgcatggttcaaaagtgaaagacggtcttgctgtcacttatagatggatccgcgctgcattagctagttggtaaggtaacggcttaccaaggcaacgatgcatagccgacctgagagggtgatcggccacactggaactgagacacggtccagactcctacgggaggcagcagtagggaatcttccgcaatgggcgaaagcctgacggagcaacgccgcgtgagtgatgaaggtcttcggatcgtaaaactctgttattagggaagaacatatgtgtaagtaactgtgcacatcttgacggtacctaatcagaaagccacggctaactacgtgccagcagccgcggtaatacgtaggtggcaagcgttatccggaattattgggcgtaaagcgcgcgtaggcggttttttaagtctgatgtgaaagcccacggctcaaccgtggagggtcattggaaactggaaaacttgagtgcagaagaggaaagtggaattccatgtgtagcggtgaaatgcgcagagatatggaggaacaccagtggcgaaggcgactttctggtctgtaactgacgctgatgtgcgaaagcgtggggatcaaacaggattagataccctggtagtccacgccgtaaacgatgagtgctaagtgttagggggtttccgccccttagtgctgcagctaacgcattaagcactccgcctggggagtacgaccgcaaggttgaaactcaaaggaattgacggggacccgcacaagcggtggagcatgtggtttaattcgaagcaacgcgaagaaccttaccaaatcttgacatcctttgacaactctagagatagagctttccccttcgggggacaaagtgacaggtggtgcatggttgtcgtcagctcgtgtcgtgagatgttgggttaagtcccgcaacgagcgcaacccttaagcttagttgccatcattaagttgggcactctaagttgactgccggtgacaaaccggaggaaggtggggatgacgtcaaatcatcatgccccttatgatttgggctacacacgtgctacaatggacaatacaaagggcagcgaaaccgtgaggtcaagcaaatcccataaagttgttctcagttcggattgtagtctgcaactcgactacatgaagctggaatcgctagtaatcgtagatcagcatgctacggtgaatacgttcccgggtcttgtacacaccgcccgtcacaccacgagagtttgtaacacccgaagccggtggagtaaccttttaggagctagccgtcgaaggtgggacaaatgattggggtgaagtcgtaacaaggtagccgtatcggaaggtgcggctggatcacctcctttct

SEQ ID NO: 388 - DNA, 74 bp, Staphylococcus aureus; identical to SEQ ID NO: 228

SEQ ID NO: 389 - DNA, 73 bp, Staphylococcus aureus; identical to SEQ ID NO: 226

SEQ ID NO: 390 - DNA, 2834 bp, Staphylococcus aureus
gattaagttattaagggcgcacggtggatgccttggcactagaagccgatgaaggacgttactaacgacgatatgctttggggagctgtaagtaagctttgatccagagatttccgaatggggaaacccagcatgagttatgtcatgttatcgatatgtgaatacatagcatatcagaaggcacacccggagaactgaaacatcttagtacccggaggaagagaaagaaaattcgattcccttagtagcggcgagcgaaacgggaagagcccaaaccaacaagcttgcttgttggggttgtaggacactctgtacggagttacaaaggacgacattagacgaatcatctggaaagatgaatcaaagaaggtaataatcctgtagtcgaaaatgttgtctctcttgagtggatcctgagtacgacggagcacgtgaaattccgtcggaatctgggaggaccatctcctaaggctaaatactctctagtgaccgatagtgaaccagtaccgtgagggaaaggtgaaaagcaccccggaaggggagtgaaatagaacctgaaaccgtgtgcttacaagtagtcagagcccgttaatgggtgatggcgtgccttttgtagaatgaaccggcgagttacgatttgatgcaaggttaagcagtaaatgtggagccgtagcgaaagcgagtctgaatagggcgtttagtatttggtcgtagacccgaaaccaggtgatctacccttggtcaggttgaagttcaggtaacactgaatggaggaccgaaccgacttacgttgaaaagtgagcggatgaactgagggtagcggagaaattccaatcgaacctggagatagctggttctctccgaaatagctttagggctagcctcaagtgatgattattggaggtagagcactgtttggacgaggggcccctctcgggttaccgaattcagacaaactccgaatgccaattaatttaacttgggagtcagaacatgggtgataaggtccgtgttcgaaagggaaacagcccagaccaccagctaaggtcccaaaatatatgttaagtggaaaaggatgtggcgttgcccagacaactaggatgttggcttagaagcagccatcatttaaagagtgcgtaatagctcactagtcgagtgacactgcgccgaaaatgtaccggggctaaacatattaccgaagctgtggattgtcctttggacaatggtaggagagcgttctaagggcgttgaagcatgatcgtaaggacatgtggagcgcttagaagtgagaatgccggtgtgagtagcgaaagacgggtgagaatcccgtccaccgattgactaaggtttccagaggaaggctcgtccgctctgggttagtcgggtcctaagctgaggccgacaggcgtaggcgatggataacaggttgatattcctgtaccacctataatcgttttaatcgatggggggacgcagtaggataggcgaagcgtgcgattggattgcacgtctaagcagtaaggctgagtattaggcaaatccggtactcgttaaggctgagctgtgatggggagaagacattgtgtcttcgagtcgttgatttcacactgccgagaaaagcctctagatagaaaataggtgcccgtaccgcaaaccgacacaggtagtcaagatgagaattctaaggtgagcgagcgaactctcgttaaggaactcggcaaaatgaccccgtaacttcgggagaaggggtgctctttagggttaacgcccagaagagccgcagtgaataggcccaagcgactgtttatcaaaaacacaggtctctgctaaaccgtaaggtgatgtataggggctgacgcctgcccggtgctggaaggttaagaggagtggttagcttctgcgaagctacgaatcgaagccccagtaaacggcggccgtaactataacggtcctaaggtagcgaaattccttgtcgggtaagttccgacccgcacgaaaggcgtaacgatttgggcactgtctcaacgagagactcggtgaaatcatagtacctgtgaagatgcaggttacccgcgacaggacggaaagaccccgtggagctttactgtagcctgatattgaaattcggcacagcttgtacaggataggtaggagcctttgaaacgtgagcgctagcttacgtggaggcgctggtgggatactaccctagctgtgttggctttctaacccgcaccacttatcgtggtgggagacagtgtcaggcgggcagtttgactggggcggtcgcctcctaaaaggtaacggaggcgctcaaaggttccctcagaatggttggaaatcattcatagagtgtaaaggcataagggagcttgactgcgagacctacaagtcgagcagggtcgaaagacggacttagtgatccggtggttccgcatggaagggccatcgctcaacggataaaagctaccccggggataacaggcttatctcccccaagagttcacatcgacggggaggtttggcacctcgatgtcggctcatcgcatcctggggctgtagtcggtcccaagggttgggctgttcgcccattaaagcggtacgcgagctgggttcagaacgtcgtgagacagttcggtccctatccgtcgtgggcgtaggaaatttgagaggagctgtccttagtacgagaggaccgggatggacatacctctggtgtaccagttgtcgtgccaacggcatagctgggtagctatgtgtggacgggataagtgctgaaagcatctaagcatgaagcccccctcaagatgagatttcccaacttcggttataagatc

SEQ ID NO: 391 - DNA, 115 bp, Staphylococcus aureus; identical to SEQ ID NO: 230

SEQ ID NO: 392 - DNA, 73 bp, Staphylococcus aureus; identical to SEQ ID NO: 219

SEQ ID NO: 393 - DNA, 73 bp, Staphylococcus aureus; identical to SEQ ID NO: 220

SEQ ID NO: 394 - DNA, 73 bp, Staphylococcus aureus
gagccattagctcagttggtagagcatctgacttttaatcagagggtcagaggttcgaatcctctatggctca

SEQ ID NO: 395 - DNA, 82 bp, Staphylococcus aureus
gcgggtgtggcggaattggcagacgcactagacttaggatctagcgccttacggcgtgggggttcgactcccttcacccgca

SEQ ID NO: 396 - DNA, 72 bp, Staphylococcus aureus; identical to SEQ ID NO: 222

SEQ ID NO: 397 - DNA, 86 bp, Staphylococcus aureus
gccggggtggcggaactggcagacgcacaggacttaaaatcctgcggtgagtgatcaccgtaccggttcgattccggtcctcggca

SEQ ID NO: 398 - DNA, 74 bp, Staphylococcus aureus; identical to SEQ ID NO: 224

SEQ ID NO: 399 - DNA, 74 bp, Staphylococcus aureus; identical to SEQ ID NO: 225

SEQ ID NO: 400 - DNA, 73 bp, Staphylococcus aureus; identical to SEQ ID NO: 226

SEQ ID NO: 401 - DNA, 74 bp, Staphylococcus aureus
ggcggtgtagctcagctggctagagcgtacggttcatacccgtgaggtcgggggttcgatcccctccaccgcca

SEQ ID NO: 402 - DNA, 74 bp, Staphylococcus aureus
ggacctttagctcagttggttagagctaacggctcataaccgttcggtcgcaggttcgagtcctgcaaggtcca

SEQ ID NO: 403 - DNA, 90 bp, Staphylococcus aureus; identical to SEQ ID NO: 188

SEQ ID NO: 404 - DNA, 73 bp, Staphylococcus aureus; identical to SEQ ID NO: 384

SEQ ID NO: 405 - DNA, 90 bp, Staphylococcus aureus
ggaggaatacccaagtccggctgaagggatcggtcttgaaaaccgacagggccttaacgggccgcgggggttcgaatccctcttcctccg

SEQ ID NO: 406 - DNA, 74 bp, Staphylococcus aureus; identical to SEQ ID NO: 375

SEQ ID NO: 407 - DNA, 73 bp, Staphylococcus aureus; identical to SEQ ID NO: 384

SEQ ID NO: 408 - DNA, 73 bp, Staphylococcus aureus; identical to SEQ ID NO: 377

SEQ ID NO: 409 - DNA, 73 bp, Staphylococcus aureus; identical to SEQ ID NO: 220

SEQ ID NO: 410 - DNA, 81 bp, Staphylococcus aureus
ggaggggtagcgaagtggctaaacgcggcggactgtaaatccgctccttcgggttcggcagttcgaatctgcccccctcca

SEQ ID NO: 411 - DNA, 71 bp, Staphylococcus aureus
aggggcatagttcaacggtagaatagaggtctccaaaacctttggtgtgggttcgattcctactgcccctg

SEQ ID NO: 412 - DNA, 73 bp, Staphylococcus aureus
gcggctgtggtgaagtggttaacacatcggattgtggttccgacattcgagggttcgatccccttcagccgcc

SEQ ID NO: 413 - DNA, 72 bp, Staphylococcus aureus
tgggctatagccaagcggtaaggcaacggactttgactccgtcactcgttggttcgaatccagctagcccag

SEQ ID NO: 414 - DNA, 71 bp, Staphylococcus aureus
ggcggcatagccaagtggtaaggcagaggtctgcaaaacctttatcaccggttcaaatccggttgccgcct

SEQ ID NO: 415 - DNA, 72 bp, Staphylococcus aureus
gcgggagtagttcaacttttagaacacgttccttcccggaacgaggtataggtgcaaatcctatcttccgct

SEQ ID NO: 416 - DNA, 1314 bp, Staphylococcus aureus
atgagacagtggacggcaatccatctagcgaaattggcgcgtaaagcaagtagagcagtaggtaaaagaggaacagatttacctggacaaatcgctagaaaagtggatacagatgtattaagaaaattagcagagcaagttgatgatattgtatttatcagtggaacaaatggtaaaacaacgacttcaaacttaattggacatactttaaaagcaaataatattcaaattatacacaataatgaaggtgctaatatggctgcaggtataacttctgcattcatcatgcaatcaacacctaagactaaaattgcggtaatcgaaattgatgaaggttcgattccacgtgtgttaaaagaagttacaccttcaatgatggtatttactaatttctttagagatcaaatggatcgcttcggtgaaattgatattatggttaataacattgcagagacaattagtaataaaggcatcaaattattgctaaatgctgatgatccatttgtgagtcgtttgaaaatcgcaagtgatacgattgtgtactatggtatgaaagcacatgcccatgaatttgaacaaagtacgatgaatgaaagtagatattgtccaaactgtggtcgcttattgcaatacgattatattcattataatcaaattggtcattatcactgtcagtgtggtttcaaacgagagcaagcaaaatatgaaatatcaagttttgatgtggcaccgtttttatatttaaatatcaatgatgaaaaatatgatatgaaaattgcaggtgactttaacgcttataacgcgttagcagcatatactgttttaagagagctagggttaaatgaacaaacaattaaaaatggctttgaaacgtatacatcagacaatggtcgtatgcagtactttaaaaaagaacgaaaagaagcgatgatcaatttagctaaaaatcctgcaggaatgaatgcaagtttatcagttggtgaacaattagaaggcgaaaaagtgtatgttatttcgctaaatgataacgctgcagatggtcgagatacttcatggatttatgatgcagattttgaaaaattatctaagcaacaaattgaagctatcatcgtgacaggtacacgagcagaagaacttcaattgcgattgaagttagcagaggttgaagtaccaattatagttgagcgtgatatttataaagcaacggcaaagactatggattataaaggtttcacagttgcaataccaaactatacatcattagcgcctatgcttgaacaattaaaccgttcgtttgaaggaggtcaatcataa

SEQ ID NO: 417 - DNA, 732 bp, Staphylococcus aureus
atgcatgaattgactatttatcattttatgtcagataaattgaatttatacagtgatataggaaatattattgctttaagacaacgtgctaaaaaacgaaatattaaagttaatgtcgtagaaatcaatgaaacagaaggtattacctttgatgaatgtgatattttctttatcggtggtggaagtgatagagaacaagcattagcaacaaaagaattaagtaaaattaagacaccacttaaagaagcgattgaagatggtatgccgggattaacaatttgtggaggctatcaatttttaggaaaaaaatatatcacgcctgatggtacagaattagaagggttaggtattttagatttttatactgaatcaaagacaaaccgattaacaggagatattgttatcgaaagtgatacttttggaactattgtaggttttgaaaatcacggtggtagaacatatcatgatttcggtacacttggtcatgttacttttggttatggtaataatgatgaagataaaaaagaaggcattcattataaaaatttattaggtacttatttacacggaccaattttacctaaaaattacgaaatcactgattatctgttagaaaaagcttgtgaacgtaaggggattccgtttgagcctaaagaaatagataatgaagcggaaatacaagcgaaacaagtattaatagacagagcaaatagacagaagaaatctcgttaa

SEQ ID NO: 418 - DNA, 948 bp, Staphylococcus aureus
atgaggaaacgtgctagaatcatttataacccgacatcaggtaaagagctatttaaaagagaattacctgatgccttaataaaattagaaaaagcgggatatgaaacgagtgcatatgcaaccgagaaaataggtgatgccacacttgaagcagaaagagctatgcatgaaaattatgatgtattaatcgctgcaggtggtgatggaacattaaatgaagtagttaatggtatcgcagaaaagcctaatcgtcctaagctaggtgtcattcctatgggtactgttaatgactttggacgtgcattgcatatacctaatgacatcatgggggcacttgatgtcatcattgaaggtcattctactaaagtagatattggtaaaatgaataatcgatactttattaatttagctgcaggcggacaattgacgcaagtctcttatgaaacaccgagtaaattgaaatctattgttggtccatttgcttattacatcaaaggtttcgaaatgttacctcaaatgaaagctgtagatttaagaattgaatatgatggtaatgttttccaaggagaagcattattattctttttaggtttaacaaattcaatggcaggatttgaaaaattagtgccggacgctaagttagatgacggctattttacgttaattatagttgaaaaatcaaaccttgcagaacttggtcatattatgactttagcttcaagaggagaacatactaagcatcctaaagttatttatgaaaaagcaaaggcaattaatatttcatcattcacagacttacaactaaatgtagatggagaatatggtggtaaattaccagcgaatttcttaaatctagaacgtcatatagatgtctttgcacctaatgatattgtaaatgaagagttaataaataatgatcatgttgatgacaatttaatcgaagaataa

SEQ ID NO: 419 - DNA, 303 bp, Staphylococcus aureus
atgacaaaagtaacacgtgaagaagttgagcatatcgcgaatcttgcaagacttcaaatttctcctgaagaaacggaagaaatggccaacacattagaaagcattttagattttgcaaaacaaaatgatagcgctgatacagaaggcgttgaacctacatatcacgttttagatttacaaaacgttttacgtgaagataaagcaattaaaggtattccgcaagaattagctttgaaaaatgccaaagaaacagaagatggacaatttaaagtgcctacaatcatgaatgaggaggacgcgtaa

SEQ ID NO: 420 - DNA, 1458 bp, Staphylococcus aureus
atgagcattcgctacgaatcggttgagaatttattaactttaataaaagacaaaaaaatcaaaccatctgatgttgttaaagatatatatgatgcaattgaagagactgatccaacaattaagtcttttctagcgctggataaagaaaatgcaatcaaaaaagcgcaagaattggatgaattacaagcaaaagatcaaatggatggcaaattatttggtattccaatgggtataaaagataacattattacaaacggattagaaacaacatgtgcaagtaaaatgttagaaggttttgtgccaatttacgaatctactgtaatggaaaaactacataaagagaatgccgttttaatcggtaaattaaatatggatgagtttgcaatgggtggttcaacagaaacatcttatttcaaaaaaacagttaacccatttgaccataaagcagtaccaggtggttcatcaggtggatctgcagcagcagttgcagctggcttagtaccacttagcttaggttcagacacaggtggttcaattagacaaccggctgcatattgtggcgttgtcggtatgaaaccaacatacggtcgtgtatctcgatttggattagttgcttttgcatcttcattagaccaaattggtccattgactcgaaatgtaaaagataatgcaatcgtattagaagctatttctggtgcagatgttaatgactctacaagtgcaccagttgatgatgtagactttacatctgaaattggtaaagatattaaaggattaaaagttgcattacctaaagaatacttaggtgaaggtgtagctgatgacgtaaaagaagcagttcaaaacgctgtagaaactttaaaatctttaggtgctgtcgttgaggaagtatcattgccaaatactaaatttggtattccatcatattacgtgattgcatcatcagaagcttcgtcaaacctttctcgttttgacggaattcgttatggttatcattctaaagaagctcattcattagaagaattatataaaatgtcaagatctgaaggtttcggtaaagaagtaaaacgtcgtattttcttaggtacatttgcattaagttcaggttactacgatgcttactataaaaaatctcaaaaagttagaacattgattaaaaatgactttgataaagtattcgaaaattatgatgtagtagttggtccaacagcgcctacaactgcgtttaatttaggtgaagaaattgatgatccattaacaatgtatgccaatgatttattaacaacaccagtaaacttagctggattacctggtatttctgttccttgtggacaatcaaatggccgaccaatcggtttacagttcattggtaaaccattcgatgaaaaaacgttatatcgtgtcgcttatcaatatgaaacacaatacaatttacatgacgtttatgaaaaattataa

SEQ ID NO: 421 - DNA, 1428 bp, Staphylococcus aureus
atgcattttgaaacagttataggacttgaagttcacgtagagttaaaaacggactcaaaaatgttttctccatcaccagcgcattttggagcagaacctaactcaaatacaaatgttatcgacttagcatatccaggtgtcttaccagttgttaataagcgtgcagtagactgggcaatgcgtgctgcaatggcactaaatatggaaatcgcaacagaatctaagtttgaccgtaagaactatttctatccagataatccaaaagcatatcaaatttctcaatttgatcaaccaattggtgaaaatggatatatcgatatcgaagtcgacggtgaaacaaaacgaatcggtattactcgtcttcacatggaagaagatgctggtaagtcaacacataaaggtgagtattcattagttgacttgaaccgtcaaggtacaccgctaattgaaatcgtatctgaaccagatattcgttcacctaaagaagcatatgcatatttagaaaaattacgttcaattattcaatacactggtgtatcagacgttaagatggaagagggatctttacgttgtgatgctaacatctctttgcgtccatatggtcaagaaaaatttggtactaaagccgaattgaaaaacttaaactcatttaactatgtacgtaaaggtttagaatatgaagaaaaacgccaagaagaagaattgttaaatggtggagaaatcggacaagaaacacgtcgatttgatgaatctacaggtaaaacaattttaatgcgtgttaaagaaggttctgatgattaccgttacttcccagagcctgacattgtacctttatatattgatgatgcttggaaagagcgtgttcgtcagacaattcctgaattaccagatgagcgtaaggctaagtatgtaaatgaattaggtttacctgcatacgatgcacacgtattaacattgactaaagaaatgtcagatttctttgaatcaacaattgaacacggtgcagatgttaaattaacatctaactggttaatgggtggcgtaaacgaatatttaaataaaaatcaagtagaattattagatactaaattaacaccagaaaatttagcaggtatgattaaacttatcgaagacggaacaatgagcagtaaaattgcgaagaaagtcttcccagagttagcagctaaaggtggtaatgctaaacagattatggaagataatggcttagttcaaatttctgatgaagcaacacttctaaaatttgtaaatgaagcattagacaataacgaacaatcagttgaagattacaaaaatggtaaaggcaaagctatgggcttcttagttggtcaaattatgaaagcgtctaaaggtcaagctaatccacaattagtaaatcaactattaaaacaagaattagataaaagataa

SEQ ID NO: 422 - DNA, 2004 bp, Staphylococcus aureus
atggctgatttatcgtctcgtgtgaacgagttacatgatttattaaatcaatacagttatgaatactatgtagaggataatccatctgtaccagatagtgaatatgacaaattacttcatgaactgattaaaatagaagaggagcatcctgagtataagactgtagattctccaacagttagagttggcggtgaagcccaagcctctttcaaaaaagtcaaccatgacacgccaatgttaagtttagggaatgcatttaatgaggatgatttgagaaaattcgaccaacgcatacgtgaacaaattggcaacgttgaatatatgtgcgaattaaaaattgatggcttagcagtatcattgaaatatgttgatggatacttcgttcaaggtttaacacgtggtgatggaacaacaggtgaagatattaccgaaaatttaaaaacaattcatgcgatacctttgaaaatgaaagaaccattaaatgtagaagttcgtggtgaagcatatatgccgagacgttcatttttacgattaaatgaagaaaaagaaaaaaatgatgagcagttatttgcaaatccaagaaacgctgctgcgggatcattaagacagttagattctaaattaacggcaaaacgaaagctaagcgtatttatatatagtgtcaatgatttcactgatttcaatgcgcgttcgcaaagtgaagcattagatgagttagataaattaggttttacaacgaataaaaatagagcgcgtgtaaataatatcgatggtgttttagagtatattgaaaaatggacaagccaaagagagtcattaccttatgatattgatgggattgttattaaggttaatgatttagatcaacaggatgagatgggattcacacaaaaatctcctagatgggccattgcttataaatttccagctgaggaagtagtaactaaattattagatattgaattaagtattggacgaacaggtgtagtcacacctactgctattttagaaccagtaaaagtagctggtacaactgtatcaagagcatctttgcacaatgaggatttaattcatgacagagatattcgaattggtgatagtgttgtagtgaaaaaagcaggtgacatcatacctgaagttgtacgtagtattccagaacgtagacctgaggatgctgtcacatatcatatgccaacccattgtccaagttgtggacatgaattagtacgtattgaaggcgaagtagcacttcgttgcattaatccaaaatgccaagcacaacttgttgaaggattaattcactttgtatcaagacaagccatgaatattgatggtttaggcactaaaattattcaacagctttatcaaagcgaattaattaaagatgttgctgatattttctatttaacagaagaagatttattacctttagatagaatggggcagaaaaaagttgataatttattagctgccattcaacaagctaaggacaactctttagaaaatttattatttggtctaggtattaggcatttaggtgttaaagcgagccaagtgttagcagaaaaatatgaaacgatagatcgattactaacggtaactgaagcggaattagtagaaattcatgatataggtgataaagtagcacaatctgtagttacttatttagaaaatgaagatattcgtgctttaattcaaaaattaaaagataaacatgttaatatgatttataaaggtatcaaaacatcagatattgaaggacatcctgaatttagtggtaaaacgatagtactgactggtaagctacatcaaatgacacgcaatgaagcatctaaatggcttgcatcacaaggtgctaaagttacaagtagcgttactaaaaatacagatgtcgttattgctggtgaagatgcaggttcaaaattaacaaaagcacaaagtttaggtattgaaatttggacagagcaacaatttgtagataagcaaaatgaattaaatagttag

SEQ ID NO: 423 - DNA, 1470 bp, Staphylococcus aureus
gtgtaccaattagaagacgacagtttaatgttacataatgacttatatcaaataaatatggctgaaagttattggaatgataatattcatgaaaaaatggctgtatttgatttgtattttagaaaaatgccatttaatagtggctatgctgtttttaatggtttaaaacgcgtcattgattttatagaacattttggattttcagaatctgatttggaatatttaaagtctattggctacaaggatgatttcttatcatatttaaaagatttaaaattcacaggaagcattcgttcgatgcaagaaggcgaattatgctttggtaacgaaccattgttacgcgtagaagcaccattgattcaagcgcaattaatagaaacaattttattaaacattgtaaatttccatacactaattacaacaaaggctagtagaattcgtcaaattgcatcaaatgataaattaatggagtttggtacacgtcgtgcgcaagaaattgatgcagcattgtggggcgctagagctgcttacatcgggggctttgattctacaagtaatgttagggcaggtaaattatttggtatacctgtgtctggtacacatgcacacgcatttgtccaaacttatggagatgaatatgttgccttcaaaaaatatgctgaaagacataaaaattgtgtgttcctagtagatacattccatactttaaaatctggcgtgccaaatgcaataaaagttgcaaaagaattaggtgacaaaattaactttgtaggtattcgattggattctggagatatcgcttatttatctaaagaggcaagacgtatgcttgatgaagcaggatttactgaaactaaaattatcgcgtctaatgatttggatgaagaaacgattacgagtttgaaagcacaaggtgcaaaagtagattcttggggcgttggtacaaagctgattacaggatacgatcaaccagcattaggtgcagtatataaacttgtagctattgaaaatgaagagggttcatatagtgatcgtattaaattatcaaataacgctgaaaaggttacgacgccaggtaagaaaaatgtatatcgcattataaacaagaaaacaggtaaggcagaaggcgattatattactttggaaaatgaaaatccatacgatgaacaacctttaaaattattccatccagtgcatacttataaaatgaaatttataaaatctttcgaagccattgatttgcatcataatatttatgaaaatggtaaattagtatatcaaatgccaacagaagatgaatcacgtgaatatttagcacaaggattacaatctatttgggatgaaaataagcgtttccttaatccacaagaatatccagtcgatttaagcaaggcatgttgggataataaacataaacgtatttttgaagttgcggaacacgttaaggagatggaagaagataatgagtaa

SEQ ID NO: 424 - DNA, 822 bp, Staphylococcus aureus
atgagtaaattacaagacgttattgtacaagaaatgaaagtgaaaaagcgtatcgatagtgctgaagaaattatggaattaaagcaatttataaaaaattatgtacaatcacattcatttataaaatctttagtgttaggtatttcaggaggacaagattctacattagttggaaaactagtacaaatgtctgttaacgaattacgtgaagaaggcattgattgtacgtttattgcagttaaattaccttatggagttcaaaaagatgctgatgaagttgaccaagctttgcgattcattgaaccagatgaaatagtaacagtcaatattaagcctgcagttgatcaaagtgtgcaatcattaaaagaagctggtattgttcttacagatttccaaaaaggaaatgaaaaagcgcgtgaacgtatgaaagtacaattttcaattgcttcaaaccgacaaggtattgtagtaggaacagatcattcagctgaaaatataactgggttttatacgaagtacggtgatggtgctgcagatatcgcacctatatttggtttgaataaacgacaaggtcgtcaattattagcgtatcttggtgcgccaaaggaattatatgaaaaaacgccaactgctgatttagaagatgataaaccacagcttccagatgaagatgcattaggtgtaacttatgaggcgattgataattatttagaaggtaagccagttacgccagaagaacaaaaagtaattgaaaatcattatatacgaaatgcacacaaacgtgaacttgcatatacaagatacacgtggccaaaatcctaa

SEQ ID NO: 425 - DNA, 930 bp, Staphylococcus aureus
atggctaaaacatatattttcggacataagaatccagacactgatgcaatttcatctgcgattattatggcagaatttgaacaacttagaggtaattcaggagccaaagcataccgtttaggtgatgtgagtgcagaaactcaattcgcgttagatacatttaatgtacctgctccggaattattaacggatgatttagatggtcaagatgttatcttagttgatcataacgaattccaacaaagttctgatacgattgcctctgctacaattaagcatgtaattgatcatcacagaattgcaaatttcgaaactgctggccctttatgttatcgtgctgaaccagttggttgtacagctacaattttatacaaaatgtttagagaacgtggctttgaaattaaacctgaaattgccggtttaatgttatcagcaattatctcagatagcttacttttcaaatcaccaacatgtacacaacaagacgttaaagcagctgaagaattaaaagatattgctaaagttgatattcaaaagtacggcttagatatgttaaaagcaggtgcttcaacaactgataaatcagttgaattcttattaaacatggatgctaaatcatttactatgggtgactatgtgactcgtattgcacaagttaatgctgttgaccttgacgaagtgttaaatcgtaaagaagatttagaaaaagaaatgttagctgtaagtgcacaagaaaaatatgacttatttgtacttgttgttactgacatcattaatagtgattctaaaattttagttgtaggtgctgaaaaagataaagtcggcgaagcattcaatgttcaattagaagatgacatggccttcttatctggtgttgtttctcgaaaaaaacaaatcgtacctcaaatcactgaagcattaacaaaataa

SEQ ID NO: 426 - DNA, 285 bp, Staphylococcus aureus
atgctaaaaccaattggaaatcgtgtgattattgagaaaaaagaacaagaacaaacaactaaaagtggtattgttttaactgatagtgctaaagaaaaatcaaacgaaggcgttatcgttgcagtaggaactggacgtctattaaatgatggtacaagagtgactcctgaagtgaaagaaggggaccgtgtcgtgttccaacaatatgctggtacagaagttaaacgagataatgaaacatatctagtattaaatgaagaagatattttagcggtaattgaataa

SEQ ID NO: 427 - DNA, 1617 bp, Staphylococcus aureus
atggttaaacaattgaaattctctgaagatgcacgtcaagcaatgttacgtggtgtagaccaattagcaaatgcagttaaagtaacgattggtcctaaaggacgtaatgttgtattagataaagagtttacagcacctttaattacgaacgatggtgtaacgattgctaaagaaatcgaattagaagatccatatgaaaatatgggggctaaactagttcaagaagttgcaaataagacaaatgaaattgctggtgacggtacgacaactgcaacagtattagctcaagcaatgattcaagaaggcttgaaaaatgttacaagtggtgcgaacccagttggtttacgtcaaggtatcgacaaagcagttaaagttgctgtagaagcattacatgaaaattctcaaaaagttgaaaataaaaatgaaatagcgcaagtaggtgcgatttcagcagcagatgaagaaattggacgttatatttctgaagctatggaaaaagtaggtaacgatggtgtcattacaattgaagaatcaaatggactaaacactgaactagaagtggttgaaggtatgcaatttgatcgtggttatcaatcaccatatatggttactgattcagataaaatggttgctgaattagaacgcccatacattttagtaacagataagaaaatctcgtctttccaagatatcttacctttattagaacaagtggttcaatctaatcgtccaatcttaattgtagctgatgaagttgaaggcgatgcattaacaaatatcgtgctaaaccgaatgcgtggcacatttacagctgttgcagtaaaggcgcctggtttcggtgatcgtcgtaaagcaatgttagaagatttagctattttaactggtgcgcaagtgattactgatgatttaggcttagatttaaaagatgcatcaattgatatgttaggtactgcaagtaaagtagaagtaactaaagataataccactgttgttgatggtgacggtgacgaaaacagcattgatgcacgtgtaagccaattgaaatctcaaattgaagaaactgaatctgactttgatcgtgaaaaattacaagagcgcttagctaaattagcaggtggtgttgcagttattaaagtaggtgcagcaagtgaaacagagcttaaagaacgtaaattacgtattgaagatgcattaaattctacacgtgcagcagttgaagaaggtattgttgcaggtggtggtactgcattagtaaatgtttaccaaaaagtaagtgaaattgaagcagaaggtgacattgaaacaggtgtaaatattgtacttaaagcactaactgcaccagttcgtcaaattgctgaaaatgcaggattagaaggttctgttattgtagaacgtttgaaaaacgcagagccgggtgttggttttaacgctgctacaaacgagtgggttaatatgttagaagcaggtatcgttgatccaactaaagtaacacgctcagcattacaacatgctgcaagtgttgcagcaatgttcttaacgactgaagcggttgtagcatcaattccagaaaaaaataatgaccaacctaacatgggtggcatgccgggaatgatgtaa

SEQ ID NO: 428 - DNA, 83 bp, Staphylococcus aureus
gcggtcgtggcggaatggcagacgcgctaggttgagggcctagtgggagaaatcccgtggaggttcaagtcctctcggccgca

SEQ ID NO: 429 - DNA, 71 bp, Staphylococcus aureus; identical to SEQ ID NO: 379

SEQ ID NO: 430 - DNA, 360 bp, Staphylococcus aureus
atgatacatggaattggtgtagatttaatcgaaatcgatcgaataaaagtgttatatagtaagcagccaaaattggttgagcggattttaactaaaaatgaacagcacaaattcaacaatttcacacatgagcaacgtaaaattgaatttttagctggcaggtttgctacaaaagaagcgttcagtaaagcattaggcacaggcttaggaaaacatgtagcttttaacgatatagactgttacaacgacgaacttggcaaaccaaagattgattacgaagggttcatcgtacatgttagtatctcacacactgagcattatgcgatgagccaagttgttttagaaaagtcagcattttaa

SEQ ID NO: 431 - DNA, 1149 bp, Staphylococcus aureus
atgtcggataaatattatagatctgcgtatatgaatgtagatttaaacgctgttgcatcaaatttcaaagtattcagtacattgcatccaaataaaacagtgatggctgtcgttaaagccaatgcctatggactaggtagtgttaaagtagcacgtcatttaatggaaaatggcgccacattttttgctgtagcaacgttagatgaagcgatagaacttagaatgcatgggattactgctaaaattttagtcttaggtgtgttaccagctaaagatattgataaagcgatacaacacagagttgccttaacggttccgtctaaacagtggttgaaagaagcaattaaaaacatttctggtgagcaagagaaaaagttatggttgcacattaaattagatacaggaatgggacgtttaggtattaaagatactaatacgtatcaagaagtgattgaaatcattcaacaatatgagcaacttgtatttgaaggcgtgtttacacactttgcctgtgctgacgaaccaggagatatgacaactgaacaatatcaacgttttaaagatatggtcaatgaagcaattaaacctgaatatatacattgtcagaactcagcaggctctctattaatggattgccaattctgtaatgcaataagaccaggaatttccctttatggatattatccatcagagtatgtacagcaaaaagttaaagtacaccttaaaccaagtgtgcaattaattgctaatgtagttcaaacaaagacgctacaagcgggtgagtctgtaagttatggtgcaacttatacagctactgacccaactacaatagctttgttacctattggatatgcagatggctatttacgcataatgcaaggtagctttgtaaatgtaaatggtcatcaatgcgaagttattggtcgcgtatgtatggatcagacaattgttaaagtgccagatcaagttaaagctggagattcggtgattttaatagataatcatagagaaagtccacagtcggtagaggtggtagctgaaaagcaacatactattaattatgaagtgctttgtaacttgtcgagacgtttgccgcgaatctatcatgatggtgatcaacgttttgtaacaaatgaattgttaaaataa

SEQ ID NO: 432 - DNA, 1071 bp, Staphylococcus aureus
atgacaaaagaaaatatttgtatcgtttttggagggaaaagtgcagaacacgaagtatcgattctgacagcacaaaatgtattaaatgcaatagataaagacaaatatcatgttgatatcatttatattaccaatgatggtgattggagaaagcaaaataatattacagctgaaattaaatctactgatgagcttcatttagaaaatggagaggcgcttgagatttcacagctattgaaagaaagtagttcaggacaaccatacgatgcagtattcccattattacatggtcctaatggtgaagatggcacgattcaagggctttttgaagttttggatgtaccatatgtaggaaatggtgtattgtcagctgcaagttctatggacaaacttgtaatgaaacaattatttgaacatcgagggttaccacagttaccttatattagtttcttacgttctgaatatgaaaaatatgaacataacattttaaaattagtaaatgataaattaaattacccagtctttgttaaacctgctaacttagggtcaagtgtaggtatcagtaaatgtaataatgaagcggaacttaaagaaggtattaaagaagcattccaatttgaccgtaagcttgttatagaacaaggcgttaacgcacgtgaaattgaagtagcagttttaggaaatgactatcctgaagcgacatggccaggtgaagtcgtaaaagatgtcgcgttttacgattacaaatcaaaatataaagatggtaaggttcaattacaaattccagctgacttagacgaagatgttcaattaacgcttagaaatatggcattagaggcattcaaagcgacagattgttctggtttagtccgtgctgatttctttgtaacagaagacaaccaaatatatattaatgaaacaaatgcaatgcctggatttacggctttcagtatgtatccaaagttatgggaaaatatgggcttatcttatccagaattgattacaaaacttatcgagcttgctaaagaacgtcaccaggataaacagaaaaataaatacaaaattgactaa

SEQ ID NO: 433 - DNA, 1359 bp, Staphylococcus aureus
atgattaatgttacattaaagcaaattcaatcatggattccttgtgaaattgaagatcaatttttaaatcaagagataaatggagtcacaattgattcacgagcaatttctaaaaatatgttatttataccatttaaaggtgaaaatgttgacggtcatcgctttgtctctaaagcattacaagatggtgctggggctgctttttatcaaagagggacacctatagatgaaaatgtaagcgggcctattatatgggttgaagacacattaacggcattacaacaattggcacaagcttacttgagacatgtaaaccctaaagtaattgccgtcacagggtctaatggtaaaacaacgactaaagatatgattgaaagtgtattgcataccgaatttaaagttaagaaaacgcaaggtaattacaataatgaaattggtttacctttaactattttggaattagataatgatactgaaatatcaatattggagatggggatgtcaggtttccatgaaattgaatttctgtcaaacctcgctcaaccagatattgcagttataactaatattggtgagtcacatatgcaagatttaggttcgcgcgaggggattgctaaagctaaatctgaaattacaataggtctaaaagataatggtacgtttatatatgatggcgatgaaccattattgaaaccacatgttaaagaagttgaaaatgcaaaatgtattagtattggtgttgctactgataatgcattagtttgttctgttgatgatagagatactacaggtatttcatttacgattaataataaagaacattacgatctgccaatattaggaaagcataatatgaaaaatgcgacgattgccattgcggttggtcatgaattaggtttgacatataacacaatctatcaaaatttaaaaaatgtcagcttaactggtatgcgtatggagcaacatacattagaaaatgatattactgtgataaatgatgcctataatgcaagtcctacaagtatgagagcagctattgatacactgggtactttgacagggcgtcgcattctaattttaggagatgttttagaattaggtgaaaatagcaaagaaatgcatatcggtgtaggtaattatttagaagaaaagcatatagatgtgttgtatacgtttggtaatgaagcgaagtatatttatgattcgggccagcaacatgtcgaaaaagcacaacacttcaattctaaagacgatatgatagaagttttaacaagcgatttaaaagcgcatgaccgtgtattagttaaaggatcacgtggtatgaagttagaagaagttgtaaatgctttaatttcatag

SEQ ID NO: 434 - DNA, 873 bp, Staphylococcus aureus; identical to SEQ ID NO: 128

SEQ ID NO: 435 - DNA, 1152 bp, Staphylococcus aureus
atagggaaatgtaaagtaataggagttctaagtggaggatttacgatggataaaatagtaatcaaaggtggaaataaattaacgggtgaagttaaagtagaaggtgctaaaaatgcagtattaccaatattgacagcatctttattagcttctgataaaccgagtaaattagttaatgttccagctttaagtgatgtagaaacaataaataatgtattaacaactttaaatgctgacgttacatacaaaaaggacgaaaatgctgttgtcgttgatgcaacaaagactctaaatgaagaggcaccatatgaatatgttagtaaaatgcgtgcaagtattttagttatgggacctcttttagcaagactaggacatgctattgttgcattgcctggtggttgtgcaattggaagtagaccgattgagcaacacattaaaggttttgaagctttaggcgcagaaattcatcttgaaaatggtaatatttatgctaatgctaaagatggattaaaaggtacatcaattcatttagattttccaagtgtaggagcaacacaaaatattattatggcagcatcattagctaagggtaagactttaattgaaaatgcagctaaagaacctgaaattgtcgatttagcaaactacattaatgaaatgggtggtagaattactggtgctggtacagacacaattacaatcaatggtgtagaatcattacatggtgtagaacatgctatcattccagatagaattgaagcaggcacattactaatcgctggtgctataacgcgtggtgatatttttgtacgtggtgcaatcaaagaacatatggcgagtttagtctataaactagaagaaatgggcgttgaattggactatcaagaagatggtattcgtgtacgtgctgaaggggaattacaacctgtagacatcaaaacactaccacatcctggattcccgactgatatgcaatcacaaatgatggcattgttattaacggcaaatggtcataaagtcgtaaccgaaactgtttttgaaaaccgttttatgcatgttgcagagttcaaacgtatgaatgctaatatcaatgtagaaggtcgtagtgctaaacttgaaggtaaaagtcatattgcaaggtgcacaagttaa

SEQ ID NO: 436 - DNA, 441 bp, Staphylococcus aureus
atggaaacaatttttgattataaccaaattaaacaaattatacctcacagacagccatttttattaattgataaagtagttgaatatgaagaaggtcaacgttgtgtggctattaaacaagtatcaggaaacgaaccattctttcaagggcattttcctgagtatgcggtaatgccaggcgtattaattactgaagcgttagctcaaacaggtgcggtagctattttaaatagtgaagaaaataaaggtaaaatcgctttatttgctggtattgataaatgtcgttttaaacgtcaagtagtacctggtgatactttaacgttggaagtagaaatcactaaaattaaaggaccaatcggtaaaggtaatgctaaagctactgtcgatggtcaacttgcttgtagttgtgaacttacatttgcaattcaagatgtaaaataa

SEQ ID NO: 437 - DNA, 729 bp, Staphylococcus aureus
atggatcacaaatccccgctcgtgagttggaatttattcggttttgatatcgttttcaatttatcaagtatattgatgatacttgttacggcgtttcttgtttttctacttgctatcatttgtacgcgtaatttgaaaaaaagaccaactggcaaacaaaatttcgttgaatggatttttgatttcgtgaggggaatcattgaaggtaacatggcttggaaaaaaggtggtcaattccacttcttagcagtaacgctgattctgtacatttttatagctaatatgttaggtcttccgttttctatagtaacgaaagatcacacattgtggtggaaatcaccgacagctgatgcaacagtgactttaacgttgtctacaacgataatactgttaactcacttttatggaattaaaatgcgtggtacgaaacaatatcttaaaggttatgtacagccgttttggccattggcaattattaatgtttttgaagagttcacttcaacattaacgcttggtctgcgtttgtacggtaacatatttgcaggtgagatactattaacattacttgctggcttattctttaacgaaccagcatggggttggattattagtatcccaggattaattgtttggcaagcattttcaatatttgtaggaacaatccaagcatatatctttattatgctttcgatggtttatatgtcacataaagtggcagatgaacactaa

SEQ ID NO: 438 - DNA, 522 bp, Staphylococcus aureus
gtgactgaaacagctaacttattcgttcttggtgcagctggaggcgttgagtggggtactgtgattgtacaggtcctaactttcatcgtgttacttgcgttacttaaaaagttcgcatggggtccattgaaagatgtaatggataaacgtgaaagagatattaacagagatatcgatgacgcagaacaagctaagttaaatgcacagaaacttgaagaagaaaataaacaaaaacttaaagaaacacaagaagaagttcaaaagattttagaagatgctaaggttcaagcacgtcaacagcaagaacaaattattcatgaagcaaacgtacgtgcaaacggtatgattgaaacagcacaaagtgaaatcaatagccaaaaagaacgtgccattgcagatattaataatcaagtatctgaactatcagtgttaattgcttctaaagttcttagaaaagaaatttctgaacaagaccaaaaagcattggttgacaagtatctaaaagaggcaggcgataaataa

SEQ ID NO: 439 - DNA, 540 bp, Staphylococcus aureus
atggtaaaagtagctaacaagtatgctaaagcattatttgacgtgtcattagatacaaataatttagagactattaatgaagaattaacagttataaatgaagcagtaaaagataaaattgagcaattgaaaatggttgacagtaatccaactcaaacagcagaacaacgtcgtgagttgattaatggtgtatttactgacattaatccatacattaaaaatatgatgtacgtgttagcagataatagacatatctcattaatagctgacgtattcaaggcgttccaaagcttatataacggacactacaatcaagattttgcaacaattgagtcaacatatgaattgagtcaagaagagttagataagattgtcaaactagtaactcaacaaacgaagttatctaaagttattgtagatacaaaaattaatccagatttaattggtggatttagagttaaagtcggcacaactgtattagatggtagtgttagaaatgatcttgtccaattacaaagaaaatttagaagagttaattaa

SEQ ID NO: 440 - DNA, 1509 bp, Staphylococcus aureus
atggccataaaagctgaagaaatcagtgcattacttcgctcacaaattgaaaattatgagtcagaaatgtccgtaactgatgtaggtactgtattacaaattggtgatggtattgcattaattcacggattaaatgacgttatggctggtgagctagtagaattccataacggcgtacttggtttagcccaaaaccttgaagagtcaaacgtgggtgtggttattttaggaccatatacaggtattactgaaggtgacgaagttaaacgtactggtcgtatcatggaagtaccagtaggtgaagaactaatcggaagagttgttaatccattaggacaacctattgatggacaaggaccgattaacacaactaaaacacgtccagtagagaaaaaagctactggtgtaatggatcgtaaatcagtagatgagccattacaaacaggtatcaaagcaattgatgctttagtaccaattggtagaggtcaacgtgagttaatcattggtgaccgtcaaacaggtaaaacaacaattgcaattgacacaattttgaaccaaaaagatcaaggtacgatttgtatctatgttgctattggtcaaaaagattcaacagtaagagcaaatgttgaaaagttaagacaagcaggcgctttagactacactattgttgtagcagcatcagcttctgaaccttctccattattatatattgcaccatattcaggtgtaacaatgggtgaagaattcatgtttaacggtaaacatgttttaatcgtttatgatgatttaactaaacaagcagcagcttatcgtgagttatcattattattacgtagacctccaggtcgtgaagcatacccaggtgacgtattctacttacatagtagattattagaaagagcagcaaaattaaacgatgacttaggtggcggttcaattactgcattaccaattatcgaaacacaagctggtgatatttcagcttatgtaccaacaaacgttatttcaattacagatggacaaatcttcttacaatctgatttattcttctcaggtgtaagaccagcgattaatgccggacaatctgtatctcgtgttggtggatctgcacaaattaaagcaatgaagaaagttgctggtacgttacgtcttgacttagcgtcatacagagaacttgaatcatttgcacaattcggttcagaccttgatgaatttactgcaagtaaattagaacgtggtaaacgtaccgttgaagtcttaaaacaagatcaaaacaaaccattaccagtcgaacaccaagtgttgattatttatgcattaacaaaaggatatttagatgatattccagttgtagatatcacacgttttgaagacgagttaaaccactgggcagaatcaaatgctactgaactgttaaatgaaatcagagaaactggtggcttaccagatgctgagaagtttgacacagcaattaacgaattcaaaaaaagctttagcaaatctgaataa

SEQ ID NO: 441 - DNA, 867 bp, Staphylococcus aureus
gtggcttctcttaaagaaatagatactcgaataaaatcaaccaaaaaaatgaagcagattacgaaagcgatgaacatggtatcaagttcaaaacttcgtagagctgaaaaaaatacaaaacaattcacaccatatatggataaaatgcaagatgcaattactgcagttgcaggggcaagtagcaatacaaaccatccaatgctaagacctcgtaaaattactagaagtggatatttagttatcacgagtgataaaggtttagcaggtgcatatagtgcaaacgtgcttaaaaaattgattactgatattgaagcgaaacatcaagatagtagcgaatacagtattgtagttttagggcaacaaggtgttgatttcctaaaaaatagaggttatgacattgagtattctcaagtagacgtacctgatcaaccttctttcaaatctgttcaagcactagctaaccatgctatagacttatacagtgaagaagaaattgatgaattaaatatatactatagtcattatgtcagcgttcttgaaaacaagcctacatctagacaagtattaccattatctcaagaggattctagtaaggggcatggtcatttgtcttcttatgaatttgagccagataaagaatctatcttaagtgtaatcttgcctcaatatgttgagagtttgatttacggaacaatattagacgcaaaagcaagtgagcatgcaacacgtatgactgcgatgaaaaatgccactgataatgcaactgaacttattgatgacttatcattagaatataacagagcgagacaagcagaaattacgcaacaaattactgaaattgttggtggttccgcagcgcttgaataa

SEQ ID NO: 442 - DNA, 1413 bp, Staphylococcus aureus
atgggaattggccgtgtaactcaagttatgggtcctgtaattgatgttcgatttgaacataacgaagttcctaaaattaataacgccttggttattgatgtgcctaaagaagaaggtacaatacaactaacattagaagttgcgctgcaattaggtgacgacgttgttcgtacaattgcgatggattcaactgatggtgtccaaagaggcatggatgtaaaagatacaggcaaagaaattagtgtacctgttggtgacgaaacattaggtcgtgtatttaatgtactaggtgaaacaattgaccttaaagaagaaattagtgattctgttcgccgcgatcctatccatcgtcaagcaccagcattcgatgaactttcaacagaagttcaaattttagaaacaggtattaaagtagtagatttactagcaccttatattaaaggtggtaaaatcggattgttcggtggtgccggtgtaggtaaaacagtattaatccaagaattaattaacaacatcgctcaagagcacggtggtatttctgtattcgccggtgtaggtgaacgtactcgtgaaggtaacgatttatacttcgaaatgagtgacagtggtgtaattaagaaaacagccatggtattcgggcaaatgaatgagccacctggtgcacgtatgcgtgttgcattatctggtttaacaatggctgaatatttccgtgacgaacaaggtcaagacgtattattattcatcgataacattttcagatttacacaagctggttctgaggtatctgcattattaggtcgtatgccttctgcagtaggttaccaaccaacacttgctactgaaatgggacaattacaagaacgtattacgtctacaacaaaaggatcagttacttctattcaagcggtattcgtacctgccgatgactatactgacccagcgcctgcgacagcgtttgcccatttagatgcaactactaacttagaacgtaaattaactgaaatgggtatttatccagccgtggatccattagcgtctacatcaagagcattggaaccatcaattgtaggtcaagaacattatgaagtagctcgtgatgtacaatcaacacttcaaaaataccgtgaattgcaagatatcattgctatcttaggtatggacgaattatctgatgaagataaacaaacagttgaacgcgcacgtagaattcaattcttcttatctcaaaacttccacgtagcggaacaatttactggtcaaaaaggttcttatgtacctgttaagacaacagttgcaaactttaaagatatcttagatggtaaatatgaccatattccagaagatgcattccgtttagttggtagcatggatgatgttattgcaaaagctaaagatatgggtgttgaagtataa

SEQ ID NO: 443 - DNA, 405 bp, Staphylococcus aureus
atgaatacattaaacctagatattgtcactcctaatggttctgtttacaatcgtgataatgttgaactcgttgttatgcaaacaacagctggtgagataggtgtcatgagtggacatattccaactgtagctgctttaaaaacaggctttgtaaaagtgaaatttcacgatggaactgaatatattgctgtaagcgatggctttgttgaagttagaaaagataaagtttcaatcattgttcagactgcagaaactgcaagagaaattgatgttgaaagagctaaattagccaaagcaagagcagagtctcacttggaaaatgatgacgacaatactgatattcatagagccgaaagagctttagagagagcaaataaccgtttgcgtgtggctgaattaaaatag

SEQ ID NO: 444 - DNA, 630 bp, Staphylococcus aureus
atgagtaaagtacacgttttcgatcatccattaattcaacacaaactaagctatattagagatgtaaatacaggtactaaagaatttagagaacttgtagacgaagttggtatgttgatggcatatgaagtaactagagacttagagcttcaggatgttgatattgaaacgcctgtaactaaaatgacggctaaacgattagctggtaaaaaattagctatcgttccaattttaagagctggtttaggtatgactgatggtattttaagtttagtacctgcagccagagttggacatatcggtttatatcgagatcccgaaacattaaaggctgtagagtattttgctaagttacctcaagatattactgaaagacaaatcattgttgttgatcctatgttagcaacaggcgcatcagcaattgaagctattacttcattgaagaaacgtggcgctaaaaatattcgcttcatgtgtttaattgcagcaccagaaggcgtagaaaagatgcatgaagcacatccggatgtagatatttatattgctgcacttgatgaaaagctaaatgataaagcatatatcacaccagggttaggcgacgctggagatagattgtttggtactaaatag

SEQ ID NO: 445 - DNA, 1077 bp, Staphylococcus aureus
gtgtttgatcaattagatattgtagaagaaagatacgaacagttaaatgaactgttaagtgacccagatgttgtaaatgattcagataaattacgtaaatattctaaagagcaagctgatttacaaaaaactgtagatgtttatcgtaactataaagctaaaaaagaagaattagctgatattgaagaaatgttaagtgagactgatgataaagaagaagtagaaatgttaaaagaggagagtaatggtattaaagctgaacttccaaatcttgaagaagagcttaaaatattattgattcctaaagatcctaatgatgacaaagacgttattgtagaaataagagcagcagcaggtggtgatgaggctgcgatttttgctggtgatttaatgcgtatgtattcaaagtatgctgaatcacaaggattcaaaactgaaatagtagaagcgtctgaaagtgaccatggtggttacaaagaaattagtttctcagtttctggtaatggcgcgtatagtaaattgaaatttgaaaatggtgcgcaccgcgttcaacgtgtgcctgaaacagaatcaggtggacgtattcatacttcaacagctacagtggcagttttaccagaagttgaagatgtagaaattgaaattagaaatgaagatttaaaaatcgacacgtatcgttcaagtggtgcaggtggtcagcacgtaaacacaactgactctgcagtacgtattacccatttaccaactggtgtcattgcaacatcttctgagaagtctcaaattcaaaaccgtgaaaaagcaatgaaagtgttaaaagcacgtttatacgatatgaaagttcaagaagaacaacaaaagtatgcgtcacaacgtaaatcagcagtcggtactggtgatcgttcagaacgtattcgaacttataattatccacaaagccgtgtaacagaccatcgtataggtctaacgcttcaaaaattagggcaaattatggaaggccatttagaagaaattatagatgcactgactttatcagagcagacagataaattgaaagaacttaataatggtgaattataa

SEQ ID NO: 446 - DNA, 1260 bp, Staphylococcus aureus; identical to SEQ ID NO: 134

SEQ ID NO: 447 - DNA, 810 bp, Staphylococcus aureus
atggatttttccaacttttttcaaaacctcagtacgttaaaaattgtaacgagtatccttgatttactgatagtttggtatgtactttatcttctcatcacggtctttaagggaactaaagcgatacaattacttaaagggatattagtaattgttattggtcagcagataagtatgatattgaacttgactgcaacatctaaattattcgatatcgttattcaatggggggtattagctttaatagtaatattccaaccagaaattagacgtgcgttagaacaacttggtagaggtagctttttaaaacgctatacttctaatacgtatagtaaagatgaagagaaattgattcaatcggtttcaaaggctgtgcaatatatggctaaaagacgtataggtgcattaattgtctttgaaaaagaaacaggtcttcaagattatattgaaacaggtattgcaatggattcaaatatttcgcaagaacttttaattaatgtctttatacctaacacacctttacatgatggtgcaatgattattcaaggcactaagattgcagcagcagcaagttatttgccattgtctgatagtcctaagatatctaaaagtttgggtacaagacatagagctgcggttggtatttcagaagtatctgatgcatttaccgttattgtatctgaagaaactggtgatatttcggtaacatttgatggaaaattacgacgagacatttcaaacgaaatttttgaagagttgcttgctgaacattggtttggcacacgctttcaaaagaaaggtgtgaaataa

SEQ ID NO: 448 - DNA, 1356 bp, Staphylococcus aureus
atgggaaaatattttggtacagacggagtaagaggtgtcgcaaaccaagaactaacacctgaattggcatttaaattaggaagatacggtggctatgttctagcacataataaaggtgaaaaacacccacgtgtacttgtaggtcgcgatactagagtttcaggtgaaatgttagaatcagcattaatagctggtttgatttcaattggtgcagaagtgatgcgattaggtattatttcaacaccaggtgttgcatatttaacacgcgatatgggtgcagagttaggtgtaatgatttcagcctctcataatccagttgcagataatggtattaaattctttggatcagatggttttaaactatcagatgaacaagaaaatgaaattgaagcattattggatcaagaaaatccagaattaccaagaccagttggcaatgatattgtacattattcagattactttgaaggggcacaaaaatatttgagctatttaaaatcaacagtagatgttaactttgaaggtttgaaaattgttttagatggtgcaaatggttcaacatcatcactagcgccattcttatttggtgatttagaagcagatactgaaacaattggatgtagtcctgatggatataatatcaatgagaaatgtggctctacacatcctgaaaaattagctgaaaaagtagttgaaactgaaagtgattttgggttagcatttgacggcgatggagacagaatcatagcagtagatgagaatggtcaaatcgttgacggtgaccaaattatgtttattattggtcaagaaatgcataaaaatcaagaattgaataatgacatgattgtttctactgttatgagtaatttaggtttttacaaagcgcttgaacaagaaggaattaaatctaataaaactaaagttggcgacagatatgtagtagaagaaatgcgtcgcggtaattataacttaggtggagaacaatctgggcatatcgttatgatggattacaatacaactggtgatggtttattaactggtattcaattagcttctgtaataaaaatgactggtaaatcactaagtgaattagctggacaaatgaaaaaatatccacaatcattaattaacgtacgcgtaacagataaatatcgtgttgaagaaaatgttgacgttaaagaagttatgactaaagtagaagtagaaatgaatggagaaggtcgaattttagtaagaccttctggaacagaaccattagttcgtgtcatggttgaagcagcaactgatgaagatgctgaaagatttgcacaacaaatagctgatgtggttcaagataaaatgggattagataaataa

SEQ ID NO: 449 - DNA, 1555 bp, Staphylococcus aureus
ttttatggagagtttgatcctggctcaggatgaacgctggcggcgtgcctaatacatgcaagtcgagcgaacggacgagaagcttgcttctctgatgttagcggcggacgggtgagtaacacgtggataacctacctataagactgggataacttcgggaaaccggagctaataccggataatattttgaaccgcatggttcaaaagtgaaagacggtcttgctgtcacttatagatggatccgcgctgcattagctagttggtaaggtaacggcttaccaaggcaacgatgcatagccgacctgagagggtgatcggccacactggaactgagacacggtccagactcctacgggaggcagcagtagggaatcttccgcaatgggcgaaagcctgacggagcaacgccgcgtgagtgatgaaggtcttcggatcgtaaaactctgttattagggaagaacatatgtgtaagtaactgtgcacatcttgacggtacctaatcagaaagccacggctaactacgtgccagcagccgcggtaatacgtaggtggcaagcgttatccggaattattgggcgtaaagcgcgcgtaggcggttttttaagtctgatgtgaaagcccacggctcaaccgtggagggtcattggaaactggaaaacttgagtgcagaagaggaaagtggaattccatgtgtagcggtgaaatgcgcagagatatggaggaacaccagtggcgaaggcgactttctggtctgtaactgacgctgatgtgcgaaagcgtggggatcaaacaggattagataccctggtagtccacgccgtaaacgatgagtgctaagtgttagggggtttccgccccttagtgctgcagctaacgcattaagcactccgcctggggagtacgaccgcaaggttgaaactcaaaggaattgacggggacccgcacaagcggtggagcatgtggtttaattcgaagcaacgcgaagaaccttaccaaatcttgacatcctttgacaactctagagatagagccttccccttcgggggacaaagtgacaggtggtgcatggttgtcgtcagctcgtgtcgtgagatgttgggttaagtcccgcaacgagcgcaacccttaagcttagttgccatcattaagttgggcactctaagttgactgccggtgacaaaccggaggaaggtggggatgacgtcaaatcatcatgccccttatgatttgggctacacacgtgctacaatggacaatacaaagggcagcgaaaccgcgaggtcaagcaaatcccataaagttgttctcagttcggattgtagtctgcaactcgactacatgaagctggaatcgctagtaatcgtagatcagcatgctacggtgaatacgttcccgggtcttgtacacaccgcccgtcacaccacgagagtttgtaacacccgaagccggtggagtaaccttttaggagctagccgtcgaaggtgggacaaatgattggggtgaagtcgtaacaaggtagccgtatcggaaggtgcggctggatcacctcctttct

SEQ ID NO: 450 - DNA, 2834 bp, Staphylococcus aureus
gattaagttattaagggcgcacggtggatgccttggcactagaagccgatgaaggacgttactaacgacgatatgctttggggagctgtaagtaagctttgatccagagatttccgaatggggaaacccagcatgagttatgtcatgttatcgatatgtgaatacatagcatatcagaaggcacacccggagaactgaaacatcttagtacccggaggaagagaaagaaaattcgattcccttagtagcggcgagcgaaacgggaagagcccaaaccaacaagcttgcttgttggggttgtaggacactctatacggagttacaaaggacgacattagacgaatcatctggaaagatgaatcaaagaaggtaataatcctgtagtcgaaaatgttgtctctcttgagtggatcctgagtacgacggagcacgtgaaattccgtcggaatctgggaggaccatctcctaaggctaaatactctctagtgaccgatagtgaaccagtaccgtgagggaaaggtgaaaagcaccccggaaggggagtgaaatagaacctgaaaccgtgtgcttacaagtagtcagagcccgttaatgggtgatggcgtgccttttgtagaatgaaccggcgagttacgatttgatgcaaggttaagcagtaaatgtggagccgtagcgaaagcgagtctgaatagggcgtttagtatttggtcgtagacccgaaaccaggtgatctacccttggtcaggttgaagttcaggtaacactgaatggaggaccgaaccgacttacgttgaaaagtgagcggatgaactgagggtagcggagaaattccaatcgaacctggagatagctggttctctccgaaatagctttagggctagcctcaagtgatgattattggaggtagagcactgtttggacgaggggcccctctcgggttaccgaattcagacaaactccgaatgccaattaatttaacttgggagtcagaacatgggtgataaggtccgtgttcgaaagggaaacagcccagaccaccagctaaggtcccaaaatatatgttaagtggaaaaggatgtggcgttgcccagacaactaggatgttggcttagaagcagccatcatttaaagagtgcgtaatagctcactagtcgagtgacactgcgccgaaaatgtaccggggctaaacatattaccgaagctgtggattgtcctttggacaatggtaggagagcgttctaagggcgttgaagcatgatcgtaaggacatgtggagcgcttagaagtgagaatgccggtgtgagtagcgaaagacgggtgagaatcccgtccaccgattgactaaggtttccagaggaaggctcgtccgctctgggttagtcgggtcctaagctgaggccgacaggcgtaggcgatggataacaggttgatattcctgtaccacctataatcgttttaatcgatggggggacgcagtaggataggcgaagcgtgcgattggattgcacgtctaagcagtaaggctgagtattaggcaaatccggtactcgttaaggctgagctgtgatggggagaagacattgtgtcttcgagtcgttgatttcacactgccgagaaaagcctctagatagaaaataggtgcccgtaccgcaaaccgacacaggtagtcaagatgagaattctaaggtgagcgagcgaactctcgttaaggaactcggcaaaatgaccccgtaacttcgggagaaggggtgctctttagggttaacgcccagaagagccgcagtgaataggcccaagcgactgtttatcaaaaacacaggtctctgctaaaccgtaaggtgatgtataggggctgacgcctgcccggtgctggaaggttaagaggagtggttagcttctgcgaagctacgaatcgaagccccagtaaacggcggccgtaactataacggtcctaaggtagcgaaattccttgtcgggtaagttccgacccgcacgaaaggcgtaacgatttgggcactgtctcaacgagagactcggtgaaatcatagtacctgtgaagatgcaggttacccgcgacaggacggaaagaccccgtggagctttactgtagcctgatattgaaattcggcacagcttgtacaggataggtaggagcctttgaaacgtgagcgctagcttacgtggaggcgctggtgggatactaccctagctgtgttggctttctaacccgcaccacttatcgtggtgggagacagtgtcaggcgggcagtttgactggggcggtcgcctcctaaaaggtaacggaggcgctcaaaggttccctcagaatggttggaaatcattcatagagtgtaaaggcataagggagcttgactgcgagacctacaagtcgagcagggtcgaaagacggacttagtgatccggtggttccgcatggaagggccatcgctcaacggataaaagctaccccggggataacaggcttatctcccccaagagttcacatcgacggggaggtttggcacctcgatgtcggctcatcgcatcctggggctgtagtcggtcccaagggttgggctgttcgcccattaaagcggtacgcgagctgggttcagaacgtcgtgagacagttcggtccctatccgtcgtgggcgtaggaaatttgagaggagctgtccttagtacgagaggaccgggatggacatacctctggtgtaccagttgtcgtgccaacggcatagctgggtagctatgtgtggacgggataagtgctgaaagcatctaagcatgaagcccccctcaagatgagatttcccaacttcggttataagatc

SEQ ID NO: 451 - DNA, 115 bp, Staphylococcus aureus; identical to SEQ ID NO: 230

SEQ ID NO: 452 - DNA, 72 bp, Staphylococcus aureus; identical to SEQ ID NO: 265

SEQ ID NO: 453 - DNA, 72 bp, Staphylococcus aureus; identical to SEQ ID NO: 381

SEQ ID NO: 454 - DNA, 73 bp, Staphylococcus aureus; identical to SEQ ID NO: 219

SEQ ID NO: 455 - DNA, 81 bp, Staphylococcus aureus; identical to SEQ ID NO: 410

SEQ ID NO: 456 - DNA, 72 bp, Staphylococcus aureus; identical to SEQ ID NO: 413

SEQ ID NO: 457 - DNA, 73 bp, Staphylococcus aureus; identical to SEQ ID NO: 394

SEQ ID NO: 458 - DNA, 810 bp, Staphylococcus aureus
gtggaggataagaattcagttattgtatttaaaaatgtttcatttcaatatcaaagtgatgcatccttcacattgaaagatgtttcttttaatatacctaaaggtcagtggacatctattgttggtcataacggttctggaaaatctacaattgccaagttaatgattggcatagagaaagttaaatctggagaaattttttataataatcaagctataactgatgataattttgaaaagttaagaaaagacataggaattgtatttcagaatccggataatcaatttgttggttcaattgtaaaatacgatgtggcatttggactcgaaaatcatgcggttccacatgacgaaatgcatagaagagtcagcgaagcacttaaacaagttgatatgttagaacgtgcagattatgaacctaatgcattatcggggggacagaagcagcgtgtggctatagcaagtgtattagcacttaacccctctgtcattatattagatgaggcgacttctatgttagatcctgatgcacgtcaaaatttattggatttagtgagaaaagttaaatcagaacataatattacaatcatttctattacgcatgatttatctgaggcgatggaagcagatcatgttatcgttatgaataaagggactgtctataaagaaggcacagcgactgaaattttcgaccatgcagaagagttaacaagaataggtctagatttgccattcccaatcaaaataaatcaaatgctgggacaccaaacatcattcttaacttatgaagggctggtggatcaactatga

SEQ ID NO: 459 - DNA, 861 bp, Staphylococcus aureus
atgactatacggtttgacaatgtaagttatacctatcaaaaagggacaccatatcagcatcaagctattcatgatgttaatacagaatttgaacaaggtaaatattacgccatcgttggacaaacgggtagtggtaaatcaacgttgatacaaaatattaatgcgctgttaaagccgactactgggacagttacagttgatgacattactattacacataagaccaaagataaatatattagacctgtaagaaaaagaattggaatggtatttcaatttcccgaatctcaattatttgaggacacagtagagcgtgaaatgatatttggacctaaaaactttaaaatgaatttagatgaagccaaaaactatgcccatcgtctgttgatggatttaggcttttcaagagatgtaatgtcacaatcaccatttcaaatgtcaggtggacaaatgcgtaaaatagcgattgtatcgatattggcaatgaatcctgatattatcgtggttgatgaacctacagcaggacttgatccacaaagtaaacgacaagtaatgagattactaaagtcactacaaacagatgaaaataaggcaattatcctaatttcacatgatatgaatgaagtcgcgcgttatgcagatgaagtcatcgttatgaaagaaggtagtatagtgtcgcaaacatcaccaaaagagctcttcaaagataaaaaaaaattggcggattggcatattggtttgccagaaattgttcagttacaatatgactttgaacaaaaatatcaaacaaaattaaaagatattgccttaactgaagaagcatttgtaagcttgtataaggagtggcaacatgaaaaataa

SEQ ID NO: 460 - DNA, 438 bp, Staphylococcus aureus
atgcgtcaaacatttatggcaaatgaatcaaacattgagcgcaaatggtatgttatcgatgctgaaggccaaacattaggtcgtttatcatcagaagtagcatctatcttacgcggtaaaaataaagtaacttacacaccacacgttgatactggtgattatgtaatcgttattaatgcatcaaaaatcgaatttactggtaacaaagaaactgacaaagtttactaccgtcactcaaatcatccaggtggtatcaaatcaatcactgctggtgaattaagaagaactaacccagaacgtttaattgaaaactcaattaaaggtatgttaccaagcactcgtttaggcgaaaaacaaggtaaaaaattatttgtatatggtggcgctgaacatccacacgctgcacaacaaccagaaaactacgaattacgtggttaa

SEQ ID NO: 461 - DNA, 309 bp, Staphylococcus aureus
atggcaaaacaaaaaatcagaatcagattaaaagcttatgatcaccgcgtgattgatcaatcagcagagaagattgtagaaacagcgaaacgttctggtgcagatgtttctggaccaattccgttaccaactgagaaatcagtttacacaatcatccgtgccgtgcatatgtataaagattcacgtgaacaattcgaacaacgtacacacaaacgtttaatcgatattgtaaacccaacaccaaaaacagttgacgctttaatgggcttaaacttaccatctggtgtagacatcgaaatcaaattataa

SEQ ID NO: 462 - DNA, 663 bp, Staphylococcus aureus
atgaccaaaggaatcttaggaagaaaaattgggatgacacaagtattcggagaaaacggtgaattaatccctgtaacagtagtagaagctaaagaaaatgttgtattacaaaagaaaactgtagaagttgatggatacaacgcaatccaagttggatttgaagacaaaaaagcatacaaaaaagatgcaaaatctaataaatatgctaataaaccagctgaaggtcacgctaaaaaagctgacgcagcacctaagcgcttcattcgtgaattccgcaatgtagacgtggatgcttacgaagtaggtcaagaagtctcagtagatacttttgtagctggcgacgttattgacgtaacaggcgtatcaaaaggtaaaggtttccaaggtgcaattaaacgccacggacaatctcgtggacctatgtcacacggttctcatttccacagagcaccaggttctgtaggtatggcttcagatgcttctagagtatttaaaggccaaaaaatgccaggacgtatgggtggaaacactgtaactgttcaaaacttagaagtagttcaagttgacacagaaaacaaagttatcttagtaaaaggtaacgtacctggacctaaaaaaggtttagtagaaatcagaacttcaattaaaaaaggtaataaataa

SEQ ID NO: 463 - DNA, 624 bp, Staphylococcus aureus
atggctaattatgatgttttaaaattagacggaactaaatcaggttcaatcgaattaagcgatgcagtattcggtattgagccaaataatagcgttttattcgaagctattaatttacaacgtgcttcattacgtcaaggtacgcatgctgttaagaatcgttcagcagtaagcggtggcggacgtaaaccatggaagcaaaaaggaacaggtcgtgctcgtcaaggtacaatccgtgctccacaatggcgtggcggtggtatcgtattcggaccaactccaagaagttatgcatacaaaatgcctaagaaaatgcgtcgtttagctttacgctcagcattatctttcaaagctcaagagaatggcttaactgtagttgacgcattcaacttcgaagctccaaaaactaaagaattcaaaaatgtattatctacattagaacaacctaaaaaagtattagtagttactgaaaacgaagatgtaaatgttgaattatcagcacgcaacatccctggcgttcaagtgacaactgctcaaggtttaaatgttttagatatcactaatgctgacagcttagtaattactgaagctgctgctaaaaaagttgaggaggtgctcggataa

SEQ ID NO: 464 - DNA, 276 bp, Staphylococcus aureus
atggaagcaagagatattcttaagcgccccgtaatcactgagaaatcttctgaagcaatggctgaagacaaatacactttcgacgttgatactcgtgttaacaaaacacaagtaaaaatggcagttgaagaaatcttcaacgtaaaagttgcaagtgttaatatcatgaattacaaacctaagaaaaaacgtatgggccgttaccaaggctatacaaacaaaagaagaaaagcgattgtaactcttaaagaaggatcaatcgacttatttaactaa

SEQ ID NO: 465 - DNA, 834 bp, Staphylococcus aureus
atggctattaaaaagtataagccaataacaaatggtcgtcgtaatatgacttcgttagatttcgcagaaatcacgaaaactacacctgaaaagtcattattaaaaccgctaccgaaaaaagcgggacgtaacaaccaaggtaaattgactgtaagacaccatggtggtggacacaaacgtcaataccgtgttatcgattttaaacgtaacaaagatggtatcaatgcaaaagttgattctattcaatatgatccaaaccgctcagcaaacatcgctttagttgtatatgcagacggtgaaaaacgatatatcattgctcctaaaggattagaagtaggtcaaatcgttgaaagtggtgctgaagctgacatcaaagttggtaacgcattaccattacaaaacattccagttggtacagtagtacacaacatcgagcttaaacctggtaaaggtggacaaatcgctcgttcagctggtgcaagtgctcaagtacttggtaaagaaggtaaatacgtattaatcagattaagatctggtgaagttcgtatgatcttatctacttgccgtgctacaatcggtcaagttggtaacctacaacacgaattagttaacgttggtaaagccggacgttcaagatggaaaggtatccgtccaacagttcgtggttctgtaatgaaccctaacgatcacccacacggtggtggtgaaggtcgtgctcctatcggtagaccatctccaatgtcaccatggggtaaacctacgcttggtaagaaaactcgtcgtggtaaaaaatcatcagacaaacttatcgttcgtggacgtaagaaaaaataa

SEQ ID NO: 466 - DNA, 279 bp, Staphylococcus aureus
atggctcgtagtattaaaaaaggacctttcgtcgatgagcatttaatgaaaaaagttgaagctcaagaaggaagcgaaaagaaacaagtaatcaaaacatggtcacgtcgttctacaattttccctaatttcatcggacatacttttgcagtatacgacggacgtaaacacgtacctgtatatgtaactgaagatatggtaggtcataaattaggtgagtttgctcctactcgtacattcaaaggacacgttgcagacgacaagaaaacaagaagataa

SEQ ID NO: 467 - DNA, 354 bp, Staphylococcus aureus
atggaagcaaaagcggttgctagaacaataagaatcgcacctcgtaaagtaagactagttcttgacttaatcagaggtaaaaatgctgctgaagctattgcaattttaaaattaacaaacaaagcttcatcaccagtaattgaaaaagtattaatgtccgctttagctaatgctgaacataactatgacatgaacacagatgaattagtagttaaagaagcatatgctaacgaaggaccaacattaaaacgtttccgtccacgtgcgcaaggtcgtgcaagtgcgattaacaaacgtacaagccacattacaatcgtcgtaagtgacggtaaagaagaagctaaagaagcttaa

SEQ ID NO: 468 - DNA, 654 bp, Staphylococcus aureus
gtgggtcaaaaaattaatccaatcggacttcgtgttggtattatccgtgattgggaagctaaatggtatgctgaaaaagacttcgcttcacttttacacgaagatttaaaaatccgtaaatttattgataatgaattaaaagaagcatcagtttctcacgtagagattgaacgtgctgcaaaccgtatcaacattgcaattcatactggtaaacctggtatggtaattggtaaaggcggttcagaaatcgaaaaattacgcaacaaattaaatgcgttaactgataaaaaagtacacatcaacgtaattgaaatcaaaaaagttgatcttgacgctcgtttagtagctgaaaacatcgcacgtcaattagaaaaccgtgcttcattccgtcgtgtacaaaaacaagcaatcactagagctatgaaacttggtgctaaaggtatcaaaactcaagtatctggtcgtttaggcggagctgacatcgctcgtgctgaacaatattcagaaggaactgttccacttcatacgttacgtgctgacatcgattatgcacacgctgaagctgacactacttacggtaaattaggcgttaaagtatggatctatcgtggagaagttcttcctactaagaacactagtggaggaggaaaataa

SEQ ID NO: 469 - DNA, 435 bp, Staphylococcus aureus
atgttactaccaaaacgtgtaaaatatcgtcgtcaacatcgtcctaaaacaactggtcgttctaaaggcggtaactacgtaacatttggtgagtttggtttacaagctacaacaacgtcttggatcacatctcgtcaaatcgaatctgctcgtatagcaatgacacgttacatgaaacgtggcgggaaagtttggattaaaatcttcccacatacaccatatactaaaaaacctttagaagtacgtatgggtgctggtaaaggtgcggttgaaggctggatcgcagttgttaaaccaggtagaattttattcgaagttgctggcgtttctgaagaagttgcgcgtgaagcactacgtttagcaagtcacaaacttccagtaaaaactaagtttgtaaaacgtgaggaattgggtggtgaaacaaatgaaagctaa

SEQ ID NO: 470 - DNA, 264 bp, Staphylococcus aureus
gtgagcgaaagaaacgatcgtaaagtttatgtaggtaaagttgtttcagacaaaatggacaagactattacagtacttgttgaaacttacaaaacacacaaattatacggtaaacgagtaaaatactctaaaaaatacaaaactcatgatgaaaacaattcagctaaattaggagacattgttaaaattcaagaaactcgtcctttatcagcaacaaaacgttttcgtatagtagagattgttgaagagtcagtaattatttaa

SEQ ID NO: 471 - DNA, 369 bp, Staphylococcus aureus
atgatccaacaagaaacacgcttgaaagtagcagacaactctggtgctcgtgaagttcttacaatcaaagtattaggtggatctggtcgtaaaacagcaaacatcggcgatgttatcgtatgtactgttaaaaatgcaacaccaggtggcgttgttaaaaaaggtgacgttgtcaaagctgtaatcgtacgtactaagtcaggtgttcgtcgtaatgacggttcatacatcaaatttgatgaaaatgcatgtgttatcatccgtgatgacaaaggcccacgtggtactcgtatcttcggacctgttgctcgtgaattacgtgaaggtaacttcatgaaaatcgtatcattagcaccagaagtactttaa

SEQ ID NO: 472 - DNA, 318 bp, Staphylococcus aureus
atgcatatcaaaaaaggtgacaacgttaaagttatcgcaggtaaagacaaaggtaaagaaggtaaagtaattgctactctacctaaaaaagaccgtgtcgttgtggaaggtgttaacattatgaaaaaacaccaaaaaccaactcaattaaatcctgaaggtggaatcttagaaacagaggcagcaatccatgtttctaatgtacaattattggaccctaaaacaaacgaaccaactcgtgtaggttacaaatttgttgatggtaaaaaagttcgtatcgctaaaaaatctggcgaagaaattaaatctaataattaa

SEQ ID NO: 473 - DNA, 540 bp, Staphylococcus aureus
ttgaaccgtttaaaagaaaagtttaacactgaagttactgaaaacttaatgaaaaaattcaattatagttcagtaatggaagtaccaaaaatagataaaatcgttgtgaacatgggtgtaggtgacgcagtacaaaattctaaagtattagacaatgctgttgaagaattagaattgatcactggtcaaaaaccattagtaactaaagctaaaaaatcaatcgcgactttccgtttacgtgaaggtatgccaatcggtgcgaaagtaacacttcgcggtgaaagaatgtatgaattcttagacaaattaatttcagtatcattaccacgtgtacgtgacttccaaggtgtttctaaaaaagcatttgacggacgcggtaactacactttaggtgttaaagaacaattaattttcccagaaatcgactatgataaagtaagtaaagttagaggaatggatattgttatcgtaacgactgctaacactgatgaagaagctcgtgaattgttagctaacttcggtatgccattccgtaaataa

SEQ ID NO: 474 - DNA, 399 bp, Staphylococcus aureus
atgacaatgacagatccaatcgcagatatgcttactcgtgtaagaaacgcaaacatggtgcgtcacgagaagttagaattacctgcatcaaatattaaaaaagaaattgctgaaatcttaaagagtgaaggtttcattaaaaatgttgaatacgtagaagatgataaacaaggtgtacttcgtttattcttaaaatatggtcaaaacgatgagcgtgttatcacaggattaaaacgtatttcaaaaccaggtttacgtgtttatgcaaaagctagcgaaatgcctaaagtattaaatggtttaggtattgcattagtatcaacttctgaaggtgtaatcactgacaaagaagcaagaaaacgtaatgttggtggagaaattatcgcatacgtttggtaa

SEQ ID NO: 475 - DNA, 537 bp, Staphylococcus aureus
atgagtcgtgttggtaagaaaattattgacatccctagtgacgtaacagtaacttttgatggaaatcatgtaactgttaaaggtcctaaaggtgaattatcaagaactttaaatgaaagaatgacattcaaacaagaagaaaacacaattgaagttgtaagaccatctgattctaaagaagatagaacaaaccatggtacaactcgtgctttattaaacaatatggtacaaggtgtttctcaaggatacgtaaaagtacttgaacttgttggtgtaggttaccgtgctcaaatgcaaggtaaagacttaatccttaacgttggttattctcacccagtagaaattaaagctgaagaaaacattactttctcagttgagaaaaacacagtcgttaaagttgaaggtatttcaaaagaacaagttggagcattagcatctaacatccgttcagtaagacctccagagccttacaaaggtaaaggtattcgttaccaaggtgaatacgttcgccgtaaagaaggtaaaactggtaaataa

SEQ ID NO: 476 - DNA, 360 bp, Staphylococcus aureus
atgatcagtaaaattgataaaaataaagtgcgtttaaaaagacatgctcgtgttcgtactaacttatcaggtacagctgaaaagccacgtttaaacgtatatcgttcaaacaagcatatctacgctcaaattattgatgataataaaggcgtaacattagctcaagcttcttcaaaagacagcgacattgctactacagcaactaaagttgaattagcaactaaagtcggtgaagcaattgctaaaaaagctgctgacaaaggcattaaagaaatcgtatttgaccgtggaggatatttatatcacggacgtgttaaagcattagctgaagcagcaagagaaagcggattagaattttaa

SEQ ID NO: 477 - DNA, 501 bp, Staphylococcus aureus
atggctcgtagagaagaagagacgaaagaatttgaagaacgcgttgttacaatcaaccgtgtagcaaaagttgtaaaaggtggtcgtcgtttccgtttcactgcattagttgtagttggagacaaaaatggtcgtgtaggtttcggtactggtaaagctcaagaggtaccagaagcaatcaaaaaagctgttgaagcagctaaaaaagatttagtagttgttccacgtgttgaaggtacaactccacacacaattactggccgttacggttcaggaagcgtatttatgaaaccggctgcacctggtacaggagttatcgctggtggtcctgttcgtgccgtacttgaattagcaggtatcactgatatcttaagtaaatcattaggatcaaacacaccaatcaacatggttcgtgctacaatcgatggtttacaaaaccttaaaaatgctgaagatgttgcgaaattacgtggcaaaacagtagaagaattatacaattaa

SEQ ID NO: 478 - DNA, 1293 bp, Staphylococcus aureus
atgattcaaacccttgtgaacttctttagaacaaaagaggttcgtaacaagattttcttcacactagcaatgttagtaatttttaaaatagggacttatataccagctccaggagtaaatcctgcagcttttgataatccccaaggttctcaaggtgccactgagttattaaatacttttggtggcggagccttgaaacgattttctatttttgcaatgggtattgtaccctacatcactgcatcaatcgtaatgcaattattacaaatggatattgtccctaaattctcagaatgggcaaaacaaggtgaagtaggtagaagaaagttaaataacgttactcgttatttagcaatttctttagcatttatccaatctataggtatggcattccaatttaataattatctcaaaggtgcgctgattatcaatcagtcaattatgagttatttattaatagcactagttttgacagcaggaactgctttcttaatatggcttggtgatcaaatcactcagttcggtgttggtaatggtatttctattatcatatttgcgggtattttatcaacgttgccagccagtctaattcaatttggacaaactgcgttcgttgggcaagaagatacatcattagcatggttgaaagtattaggacttttagtgtcactgatactattaactgtaggtgctatttatgtacttgaagccgttcgtaaaattccgattcaatatgctaagaaacaaactgctcaaagattaggttcacaggcaacttatctacctttaaaagtgaactcagccggtgttattcctgtaatctttgcaatggcgttcttcttactgcctagaacattaacgttgttctatccagataaagaatgggcacaaaacattgcgaatgctgcaaatccttcaagtaatgttggtatggttgtatatattgtactaattatactattcacatacttctatgcatttgtacaagttaatccggaaaaaatggctgataaccttaagaaacaaggtagctatgttccaggcattagacctggtgaacaaaccaaaaaatatattactaaagttttatatcgtttaacttttgtaggttctatcttcttagccgttatttcaattctaccaatattagcaactaagtttatgggattaccacaatcaattcagattggtggtacaagtttacttatcgttattggtgtagcgattgaaacaatgaaatctttagaagctcaagtatctcaaaaagaatataaaggctttggtggtagataa

SEQ ID NO: 479 - DNA, 648 bp, Staphylococcus aureus
atgaatatcattttgatgggtttacctggcgcaggtaaaggaactcaagcaagtgaaattgtcaagaaattcccaataccccacatttcaactggtgacatgttcagaaaagctataaaagaagaaactgaattaggtaaagaagctaagtcttatatggaccgtggcgaattagttcctgatgaagtgactgtaggtatcgttaaggaaagaatttctgaagacgatgcaaaaaaaggctttttattagatggcttcccaagaacaatcgagcaagctgaggcattaaataatattatgtctgagcttgacagaaacattgatgctgtcatcaatatcgaagttccggaagaagaattaatgaaccgtcttacaggtcgtcgaatctgtgagtcatgtggtacaacgtatcatcttgtatttaatcctccgaaggtcgaaggtatttgtgatatcgatggtggtaaattgtatcaacgagaagatgataatcctgaaacggtagctaatcgtttgagtgttaatattaaacaatctaagcctattttagatttctatgatcaaaaaggtgtattgaaaaatattgatggttcaaaagatattagcgacgttaccaaagatgtcattgatattttagatcatttgtaa

SEQ ID NO: 480 - DNA, 219 bp, Staphylococcus aureus
atggctaaacaagatgtaattgaattagaaggtactgtattagatactttaccgaacgcaatgtttaaagtagaattagaaaatggtcatgagattttagctcacgtaagtggtaaaatcagaatgaattacattcgtattctacctggcgacaaagtaactgttgagatgtctccgtacgatttaacacgcggaagaattacttatcgttataaataa

SEQ ID NO: 481 - DNA, 366 bp, Staphylococcus aureus
atggcacgtattgcaggagtagatattccacgtgaaaaacgcgtagttatctcattaacttatatatacggtatcggtacgtcaactgctcaaaaaattcttgaagaagctaacgtatcagctgatactcgtgtgaaagatttaactgatgacgaattaggtcgcatccgtgaagttgtagacggttataaagtcgaaggtgacttacgtcgtgaaactaacttaaatatcaaacgtttaatggaaatttcatcataccgtggtatccgtcaccgtcgtggtttaccagttcgtggtcaaaaaacgaaaaacaacgcgcgtactcgtaaaggaccagttaaaacggtagctaacaagaaaaaataa

SEQ ID NO: 482 - DNA, 390 bp, Staphylococcus aureus
atggcacgtaaacaagtatctcgtaaacgtagagtgaaaaagaatattgaaaatggtgtagcacacatccgttcaacattcaacaacactattgtaactatcactgatgagttcggtaatgctttatcatggtcatcagctggtgcattaggattcaaaggatctaaaaaatcaacaccatttgcagcacaaatggcttctgaaactgcatctaaatcagctatggagcatggtttaaaaacagttgaagtaacagttaaaggacctggtccaggtcgtgaatcagctattcgtgcattacaatctgcaggtttagaagtaactgcgatcagagacgttactccagtacctcataacggttgtcgtccaccaaaacgtcgtcgtgtataa

SEQ ID NO: 483 - DNA, 945 bp, Staphylococcus aureus
atgatagaaatcgaaaaacctagaattgagacaattgaaattagtgaagatgctaaattcggtaagttcgttgttgaaccactagaacgtggctacggtactacactaggaaactccttacgtcgtatcctactatcttcattaccaggtgcagccgttaagtatattgaaattgagggagttttacatgaattctcagcagtagacaatgtagttgaagatgtttctacaattattatgaacattaaacaattagcattgaaaatttactctgaagaagataaaactttagaaattgatgtacgtgatgaaggcgaagtaacagcaagcgacattacacatgatagtgatgttgaaattttaaacccagagcttaaaattgcaacagtatctaaaggtggtcacttaaaaattcgtctagttgctaacaagggtagaggttacgcattagcagaacaaaataatactagtgatttaccaattggtgtaatccctgttgattcattgtattcacctgttgaacgtgtgaactatactgttgaaaatacacgtgtaggtcaaagcagtgattttgataaattaacattggatgtttggactaatggttcaatcacaccacaagaatcagtttcattagcagcaaaaataatgactgaacacttgaatatcttcgttggtcttactgatgaagcgcaaaacgctgaaatcatgattgaaaaagaagaagatcaaaaagaaaaagtattagaaatgtctattgaagaattagacttatctgtacgttcatataactgcttaaaacgcgcaggaatcaattctgttcaagagttagctgacaaatctgaagctgacatgatgaaagtgcgtaatttaggtcgtaaatctttagaagaagttaaatacaaattagaagatttaggattaggattaagaaaagaagattga

SEQ ID NO: 484 - DNA, 369 bp, Staphylococcus aureus
atgggttacagaaaattaggtcgtacttctgatcaacgtaaagctatgttacgtgacttagctacatcacttattattagtgaacgtattgaaactacagaagctcgtgcaaaagaagttcgcagtgttgttgagaaattaatcactttaggtaaaaaaggagatttagcttctcgtcgtaatgcagctaaaactttacgtaatgttgaaatcttaaacgaagatgaaactacacaaactgcacttcaaaaattatttggtgaaatcgcagagcgttacacagaacgtcaaggtggttacactcgtatccttaaacaaggccctcgtcgcggtgacggtgctgaatcagtaattatcgaattagtataa

SEQ ID NO: 485 - DNA, 708 bp, Staphylococcus aureus
atgcaaatggctagaaaagttgttgtagttgatgatgaaaaaccgattgctgatattttagaatttaacttaaaaaaagaaggatacgatgtgtactgtgcatacgatggtaatgatgcagtcgacttaatttatgaagaagaaccagacatcgtattactagatatcatgttacctggtcgtgatggtatggaagtatgtcgtgaagtgcgcaaaaaatacgaaatgccaataataatgcttactgctaaagattcagaaattgataaagtgcttggtttagaactaggtgcagatgactatgtaacgaaaccgtttagtacgcgtgaattaatcgcacgtgtgaaagcgaacttacgtcgtcattactcacaaccagcacaagacactggaaatgtaacgaatgaaatcacaattaaagatattgtgatttatccagacgcatattctattaaaaaacgtggcgaagatattgaattaacacatcgtgaatttgaattgttccattatttatcaaaacatatgggacaagtaatgacacgtgaacatttattacaaacagtatggggctatgattactttggcgatgtacgtacggtcgatgtaacgattcgtcgtttacgtgaaaagattgaagatgatccgtcacatcctgaatatattgtgacgcgtagaggcgttggatatttcctccaacaacatgagtag

SEQ ID NO: 486 - DNA, 1827 bp, Staphylococcus aureus
atgaagtggctaaaacaactacaatcccttcatactaaacttgtaattgtttatgtattactgattatcattggtatgcaaattatcgggctgtattttacaaataatcttgaaaaagagctgcttgataattttaagaagaatattacgcagtacgctaaacaattagaaattagtattgaaaaagtatatgacgaaaagggctccgtaaatgcacaaaaagatattcaaaatttattaagtgagtatgccaaccgtcaagaaattggagaaattcgttttatagataaagaccaaattattattgcgacgacgaagcagtctaaccgtagtctaatcaatcaaaaagcgaatgatagttctgtccaaaaagcactatcactaggacaatcaaacgatcatttaattttaaaagattatggcggtggtaaggaccgtgtctgggtatataatatcccagttaaagtcgataaaaaggtaattggtaatatttatatcgaatcaaaaattaatgacgtttataaccaattaaataatataaatcaaatattcattgttggtacagctatttcattattaatcacagtcatcctaggattctttatagcgcgaacgattaccaaaccaatcaccgatatgcgtaaccagacggtcgaaatgtccagaggtaactatacgcaacgtgtgaagatttatggtaatgatgaaattggcgaattagctttagcatttaataacttgtctaaacgtgtacaagaagcgcaggctaatactgaaagtgagaaacgtagactggactcagttatcacccatatgagtgatggtattattgcaacagaccgccgtggacgtattcgtatcgtcaatgatatggcactcaagatgcttggtatggcgaaagaagacatcatcggatattacatgttaagtgtattaagtcttgaagatgaatttaaacttgaagaaattcaagagaataatgatagttttttattagatttaaatgaagaagaaggtctaatcgcacgtgttaactttagtacgattgtgcaggaaacaggatttgtaactggttatatcgctgtgttacatgacgttactgaacaacaacaagttgaacgtgagcgtcgtgaatttgttgccaatgtatcacatgagttacgtacacctttaacttctatgaatagttacattgaagcacttgaagaaggtgcatggaaagatgaggaacttgcgccacaatttttatctgttacccgtgaagaaacagaacgaatgattcgactggtcaatgacttgctacagttatctaaaatggataatgagtctgatcaaatcaacaaagaaattatcgactttaacatgttcattaataaaattattaatcgacatgaaatgtctgcgaaagacacaacatttattcgagatattccgaaaaagacgattttcacagaatttgatcctgataaaatgacgcaagtattcgataatgtcattacaaatgcgatgaaatattctagaggcgataaacgtgtcgagttccacgtgaaacaaaatccactttataatcgaatgacgattcgtattaaagataatggcatcggtattcctatcaataaagtcgataagatattcgaccgattctatcgtgtagataaggcacgtacgcgtaaaatgggtggtactggattaggactagccatttcgaaagagattgtggaagcgcacaatggtcgtatttgggcaaacagtgtagaaggtcaaggtacatctatctttatcacacttccatgtgaagtcattgaagacggtgattgggatgaataa

SEQ ID NO: 487 - DNA, 1050 bp, Staphylococcus aureus
atgagtgattttcaaagagaacagagaaaaaatgaacatgttgaaatagcaatggcccaatctgacgcaatgcattcagattttgataagatgcgttttgtgcatcattctatcccatcaattaatgtaaatgatatcgatttgacatcacagacgcctgacttaacgatggcatatccgatttatattaatgcaatgacgggtggtagcgagtggacgaaaaacatcaatgaaaagctagctgtagttgcaagagaaactcgcttagcgatggcagttggatcaacacatgcggcattgagaaatccacgcatggctgagacgtttacgattgcgcgaaaaatgaatcctgaaggcatgatttttagcaatgttggtgcggacgtaccagtagaaaaggctttggaagcagttgaattacttgaggcacaagcgttacaaatccatgttaattctcctcaagaattagttatgcctgaagggaatcgtgaatttgtgacttggttagataatatagcgtcgattgtatcacgagtgtctgttccagtcattataaaagaagttggatttggtatgagcaaagaattaatgcatgacttacaacaaataggcgtcaagtatgtcgatgttagtggcaaaggtggtactaactttgtagatattgaaaatgaacgtcgtgcaaataaagatatggattacttatcatcatggggacagtctacagttgagtcattacttgaaacaacggcttatcaaagcgaaatttcagttttcgcgagtggtggtttacgtacaccactcgatgcaattaaaagtttagcacttggtgcaaaggcaactggtatgtcacgtccgtttttaaatcaagttgaaaataatggcattgcacatacagtagcttatgtagaatcatttattgaacacatgaaatcaataatgacgatgttagatgctaaaaatattgacgacttaacacaaaaacaaatcgtatttagtccggaaataatgtcatggatagaacaacgtagcttgaatatacatcgaggataa

SEQ ID NO: 488 - DNA, 1851 bp, Staphylococcus aureus
atgaatcaaatcgaagaagcattaacgggtttgatttctaaagatcctgctattgttaacgaaaatgccaacaaagatagtgatacattttcaacaatgagagatttaacagcaggtatcgtttctaaatcttacgcattaaattatttattaccaaagcacgttgcagatgcacatcaaagaggggacatacattttcacgacttagattatcatccattccaaccgttaacaaactgttgtttaatagatgctaaaaatatgctacataatggatttgaaataggcaacgcgaatgtaacttcaccaaaatcaatacaaactgcatcagcgcagcttgtacaaattatagccaatgtttccagcagtcaatatggtggctgtacggttgaccgcgttgacgaattacttagtacatatgcacgacataatgaagaacaacatagaaatatcgcaaagcaatttgtcaaagaatctgaaattgatcgttatgttgatcaacaagtcactaaagacatcaatgatgcgattgaaagtctagaatatgaaattaataccttatatacatctaatggacagacaccttttgtaacattaggattcggcttaggtacagatcatttaagtcgcaaaattcaacaagctatcttaaatactcgtatcaaaggcttaggaaaagaccgcacgacagcgattttcccaaaacttgtattttcaattaaaaaaggaaccaactttagtccgcaagatccgaactatgacattaaacaactagcattaaagtgttcaacgaaacgtatgtatccagatattttaaattatgacaaactcgtagaaatattaggtgatttcaaagcgccaatgggttgtcgttcatttttaccaagttggaaagatgcggaaggtcattttgaaaataatggtcgttgtaatcttggtgttgttacacttaatttacctagaatggcattagaatctgccggtaatatgacgaaattctgggaaatcttttatgaacgtatcgatgtgttacatgatgcattactttatcgtataaatcgtttgaaagatgctgtaccgaataacgcaccaattttatataaaagtggcgcttttaactataaattaaaagaaacagatgatgttgctgagttatttaaaaataaacgtgcaacgatttcaatgggctatatagggttgtatgaaacagctactgttttctatggtccagactgggaaacatctcaagaagcaaaagcatttacgcttgaaattcttaaagaaatgaaacgttatcaaacgaaatggacagaattatatgacatttggttcagtatttacagtacgccgagtgaatcgctaacggatcgtttttgtcgtttagaccaagagagatttggagatattaaagacattacagataaaggatattatcaaaactctttccattatgatgtacgtaaagatgttacaccttttgaaaagttagattttgaaaaagattatccttattatgcgagtggtggtttcattcactattgtgagtatccgaaattgcaacacaatttgaaagcactagaagcggtatgggactactcttatgacaaagttggttacttaggtacaaatattccgattgatcattgttatgaatgtgattacgatggagattttgaagcaactgaaaaaggatttaaatgcccgaactgtggcaatgataatcctaaaacagttgatgtcgttaaacgaacatgtggttacttaggcaatccagttcaacgtccagtaattaaaggccgtcataaagaaatttgcgcacgagtaaaacatatgaaagcgcctaaagaatga

SEQ ID NO: 489 - DNA, 537 bp, Staphylococcus aureus
atgacacttttagacattaaacaaggacaaggttatattgctaaaatagaatcaaatagctttgttgacggtgaaggagtaagatgcagtgtttatgtatcaggatgtccatttaattgtgttggatgttataacaaagcctcacaaaagttcagatatggcgagaaatacactgatgaaatattagcagaaatattagatgattgcgatcatgattatatatctgggctaagtctattaggtggcgaaccattttgtaatttggatattacattaaatcttgtcaaagcatttcgagcacgttttggaaatacaaagacaatttgggtatggactggatttttatatgaatatttagcaaatgattgtacagaacgtcgagagttattatcatacattgacgttttagtagatggtctatttatacaacacttattcaaacctgatttaccatataaaggttctttaaatcaacgcattatagatgtacaacaatcactctcgcatgcgcgtatgattgaatatatagttagttga

SEQ ID NO: 490 - DNA, 1056 bp, Staphylococcus aureus
gtgaaagctttagtaaaaacaagagaaggacatggcaacttagaacttcttgataaagaagttgcaacaccgctagatgataaagtaaagattaaagtacattatgcaggaatttgtggcacagacattcatacttatgaagggcattataaagttaattttccagtgacattaggtcatgaattttctggtgaaatcgttgaagttggagcagacgttaaagattttaaagttggtgaccgtgtcacttctgaaactacattctatgtttgtaatgagtgtgaatactgtaaatcaaaagactataatttatgcaaccatcgaaaaggtattggaacacaagttgatggcgtatttactaattatgtcattgcacgtgaagaaagtttgcatcatattccagacgaagtatcgtatcagtctgcagctatgacagaaccattagcatgtgcacatcatggcgtttctaagattcaagtgaactctggcgatgtagcagttgtaatgggacctgggccaatcggattacttgtagcacaagtgttgaaaagtaaaggcgcaactgttgtggtaactggattggacaatgacaaagtcagattagataaagcagaagcattgcacatggattatgtagtcaatttacaacaaacagacttaaaaacgtatatcaatggaattacagacggttacggtgcagatgttgttgttgaatgttcaggtgcagttccagcagcacgacaaggtttagatattatacgcaaaaaaggtttctacagtcaaataggtatttttaaggatgctgaaattccatttgatatggaaaaagtgattcaaaaagaaataacagttgttggtagtagaagtcaaaagccagcagattgggaaccttcattgcaacttatggcggatggtttagtaaatgctgaagctttggtgacaaaaatatatgatatttcgaaatgggacgaggcgtatcaacatttaaaatctggcgaaggtattaaagcattacttaagccgctcgatttagatgaaaatgaaggagagaattaa

SEQ ID NO: 491 - DNA, 1362 bp, Staphylococcus aureus
atgtcggaaaaagaaatttgggaaaaagtgcttgaaattgctcaagaaaaattatcagctgtaagttactcaactttcctaaaagatactgagctttacacgattaaagatggtgaagctatcgtattatcgagtattccttttaatgcaaattggttaaatcaacaatatgctgaaattatccaagcaatcttatttgatgttgtaggctatgaagttaaacctcactttattactactgaagaattagcaaattatagtaataatgaaactgctactccaaaagaaacaacaaaaccttctactgaaacaactgaggataatcatgtgcttggtagagagcaattcaatgcccataacacatttgacacttttgtaatcggacctggtaaccgctttccacatgcagcaagtttagctgtagccgaagcaccagccaaagcgtacaatccattatttatctatggaggggttggtttaggaaaaacccatttaatgcatgccattggtcatcatgttttagataataatccagatgccaaagtgatttacacatcaagtgaaaaattcacaaatgaatttattaaatcaattcgtgataacgaaggtgaagctttcagagaaagatatcgtaatatcgacgtcttattaatcgatgatattcagttcatacaaaataaagtacaaacacaagaagaatttttctatacttttaatgaattgcatcagaataacaagcaaatagttatttcgagtgatcgaccaccaaaggaaattgcacaattagaagaccgattacgttcacgctttgaatgggggctaattgttgatattacgccaccagattatgaaactcgaatggcaattttgcagaagaaaattgaagaagaaaaattagatattccaccagaagctttaaattatatagcaaatcaaattcaatctaatattcgtgaattagaaggtgcattaacacgtttacttgcatattcacaattattaggaaaaccaattacaactgaattaactgctgaagctttaaaagatatcattcaagcaccaaaatctaaaaagattaccatccaagatattcaaaaaattgtaggccagtactataatgttaggattgaagatttcagtgcaaaaaaacgtacaaagtcaattgcatatccgcgtcaaatagctatgtacttgtctagagagcttacagatttctcattacctaaaattggtgaagaatttggtgggcgtgatcatacgaccgtcattcatgctcatgaaaaaatatctaaagatttaaaagaagatcctatttttaaacaagaagtagagaatcttgaaaaagaaataagaaatgtataa

SEQ ID NO: 492 - DNA, 1134 bp, Staphylococcus aureus
atgatggaattcactattaaaagagattattttattacacaattaaatgacacattaaaagctatttcaccaagaacaacattacctatattaactggtatcaaaatcgatgcgaaagaacatgaagttatactaactggttcagactctgaaatttcaatagaaatcactattcctaaaactgtagatggcgaagatattgtcaatatttcagaaacaggctcagtagtacttcctggacgattctttgttgatattataaaaaaattacctggtaaagatgttaaattatctacaaatgaacaattccagacattaattacatcaggtcattctgaatttaatttaagtggcttagatccagatcaatatcctttattacctcaagtttctagagatgacgcaattcaattgtcggtaaaagtgcttaaaaacgtgattgcacaaacgaattttgcagtgtccacctcagaaacacgcccagtactaactggtgtgaactggcttatacaagaaaatgaattaatatgcacagcgactgactcacaccgcttggctgtaagaaagttgcagttagaagatgtttctgaaaacaaaaatgtcatcattccaggtaaggctttagctgaattaaataaaattatgtctgacaatgaagaagacattgatatcttctttgcttcaaaccaagttttatttaaagttggaaatgtgaactttatttctcgattattagaaggacattatcctgatacaacacgtttattccctgaaaactatgaaattaaattaagtatagacaatggggagttttatcatgcgattgatcgtgcctctttattagcacgtgaaggtggtaataacgttattaaattaagtacaggtgatgacgttgttgaattatcttctacatcaccagaaattggtactgtaaaagaagaagttgatgcaaacgatgttgaaggtggtagcctgaaaatttcattcaactctaaatatatgatggatgctttaaaagcaatcgataatgatgaggttgaagttgaattcttcggtacaatgaaaccatttattctaaaaccaaaaggtgacgactcggtaacgcaattaattttaccaatcagaacttactaa

SEQ ID NO: 493 - DNA, 717 bp, Staphylococcus aureus
atgatttatgcaggtattttagcaggaggtattggttcgagaatggggaacgtgccattaccaaaacaatttttagatattgataataaaccgattttaatccatacaattgagaagttcattttagtgagtgaatttaatgagattattatcgcaacgccagcacagtggatttcccatacacaggatattttaaaaaaatataacattacagatcaacgtgtcaaagtagttgcaggtggtacggatcgaaacgaaacaattatgaacattatcgaccatattcgcaatgtaaatggaattaataatgatgatgtgattgtaactcatgatgccgtaagaccatttttaactcaacgtattattaaagagaacattgaagtagcagcaaaatatggtgcagtagatacagtcattgaagcaattgatacgattgtaatgtctaaagataaacagaacatacacagtatccctgtaaggaatgaaatgtatcaaggccaaacaccacaatcatttaatattaaattattacaagatagttatcgcgccttaagtagtgaacaaaaagaaatcttatcagatgcatgtaaaataattgtcgaatctggacatgcagttaaattggtacgtggagaactatacaacattaaagtgacaacaccgtatgatttaaaagtagcaaatgccattattcaaggtgatattgccgatgattaa

SEQ ID NO: 494 - DNA, 1026 bp, Staphylococcus aureus
atgattaatcaagtatatcaactcgttgcaccgagacagttcgacgtcacatataataatgttgatatttatggtaatcatgtcatcgtaagacctttatacttgtctatttgtgcagctgatcaaaggtattacacaggtcgaagagatgaaaatgtactgcgcaaaaaattgccaatgtcattagttcatgaagctgttggtgaagttgtattcgatagtaaaggagtatttgaaaaaggtacgaaagtagtaatggtgccgaatacacctacagagcaacatcatattatcgcggagaattacttagcctctagttattttagatctagtggttatgatggttttatgcaagactacgttgtgatggcacatgatcgtatcgttccgctgcctaatgacattgatttgagtacgatttcatacacagagttagtgtcagtaagttatcatgctatacaacgatttgaacgtaaatctatacctttgaaaaacagctttggtatttggggtgatggtaacttaggttatattactgctattttgctacgtaagttgtacccagaagctaaaatttatgtatttggtaagacagactataaattaagtcatttttcatttgtagatgacatctttacagtaaatcaaataccagatgatcttaaaattgatcatgcatttgaatgtgttggaggtaaaggaagtcaagttgcacttcaacaaatagttgaacatatttcaccagaaggcagtattgctttgttaggcgtaagtgaattacccgtggaagtgaatacacgattagtacttgaaaaaggattaacgttgattggtagtagtcgaagcggctctaaagattttgagcaagttgttgatttatatcgtaagtacccagacatagttgaaaagttagcattattaaaaggacatgaaattaatgtatgtacgatgcaagatatcgtccaagcgtttgaaatggatttatcgacatcttggggaaaaacagtattgaaatggacgatttaa

SEQ ID NO: 495 - DNA, 1353 bp, Staphylococcus aureus
atgcgaagacacgcgataattttggcagcaggtaaaggcacaagaatgaaatctaaaaagtataaagtgctacacgaggttgctgggaaacctatggtcgaacatgtattggaaagtgtgaaaggctctggtgtcgatcaagttgtaaccatcgtaggacatggtgctgaaagtgtaaaaggacatttaggcgagcgttctttatacagttttcaagagaaacaactcggtactgcgcatgcagtgcaaatggcgaaatcacacttagaagacaaggaaggtacgacaatcgttgtatgtggtgacacaccgctcatcacaaaggaaacattagaaacattgattgcgcatcatgaggatgctaatgctcaagcaactgtattatctgcatcgattcaacaaccatatggatacggaagaatcgttcgaaatgcgtcaggtcgtttagaacgcatagttgaagagaaagatgcaacgcaagctgaaaaggatattaatgaaattagttcaggtatttttgcgtttaataataaaacgttgtttgaaaaattaacacaagtgaaaaatgataatgcgcaaggtgaatattacctccctgatgtattgtcgttaattttaaatgatggcggcatcgtagaagtgtatcgtaccaatgatgttgaagaaatcatgggtgtaaatgatcgtgtaatgcttagtcaggctgagaaggcgatgcaacgtcgtacgaatcattatcacatgctaaatggtgtgacaatcatcgatcctgacagcacttttattggtccagacgttacaattggtagtgatacagtcattgaaccaggcgtacgaattaatggtcgtacagaaattggcgaagatgttgttattggtcagtactctgaaattaacaatagtacgattgaaaatggtgcatgtattcaacagtctgttgttaatgatgctagcgtaggagctaatactaaggtcggaccgtttgcgcaattgagaccaggcgcgcaattaggtgcagatgttaaggttggaaattttgtagaaattaaaaaagcagatcttaaagatggtgccaaggtttcacatttaagttatattggcgatgctgtaattggcgaacgtactaatattggttgcggaacgattacagttaactatgatggtgaaaataaatttaaaactatcgtcggcaaagattcatttgtaggttgcaatgttaatttagtagcacctgtaacaattggtgatgatgtattggtggcagctggttccacaatcacagatgacgtaccaaatgacagtttagctgtggcaagagcaagacaaacaacaaaagaaggatataggaaataa

SEQ ID NO: 496 - DNA, 966 bp, Staphylococcus aureus
atgttaaataatgaatataagaattcgtcattaaagattttttcattgaaaggaaacgaagcattagcgcaagaagttgctgaccaagtaggaattgaactaggtaaatgttcagttaaacgttttagtgatggagaaattcaaattaatatcgaagagagtattcgtggttgtgacgtatttattattcaaccaacatcatatcctgtgaatctacatttaatggaattattaattatgattgatgcttgtaaacgtgcttctgcagcaacaatcaatattgtagtgccatattatggatatgcaagacaagatagaaaagcccgtagccgtgagccaatcactgctaaattagttgcaaacttaatcgaaacagctggcgcaactcgtatgattgcgttagacttacatgcaccacaaattcaaggattctttgatattccaattgaccacttaatgggtgtgccaattcttgctaaacatttcaaagatgatccgaatattaacccagaagaatgtgtcgttgtttcaccagaccatggcggtgttacacgtgcacgtaaattagctgacattttaaaaactccaattgcaattatagataaacgtcgtcctagaccaaatgttgctgaagtgatgaacattgttggtgagattgaaggacgtacggcaattattattgacgatattattgatacagcaggtacaatcactttagctgcacaagcattaaaagataaaggtgctaaagaagtatatgcttgttgtacacaccctgttttatcaggaccggctaaagaacgtatcgaaaattctgctataaaagaattaatcgtaacaaactcaattcatttagatgaagatcgcaaaccatctaacactaaagaattatctgttgctggtttaatcgcacaagctatcattcgtgtatacgaaagagaatcagttagcgtattatttgactaa

SEQ ID NO: 497 - DNA, 2070 bp, Staphylococcus aureus
ttggcagataatttagtcattgttgaatcgcctgcaaaagcaaaaaccattgaaaagtatttaggtaagaaatataaagttatagcttcaatgggacacgtcagagacttaccaagaagtcaaatgggtgtcgacactgaagataattacgaaccaaaatatataacaatacgcggaaaaggtcctgttgtaaaagaattgaaaaaacatgcaaaaaaagcgaaaaacgtctttctcgcaagtgaccccgaccgtgaaggtgaagcaattgcttggcatttatcaaaaattttagagcttgaagattctaaagaaaatcgcgttgttttcaacgaaataactaaagacgctgttaaagaaagttttaaaaatcctagagaaattgaaatgaacttagtcgatgcacaacaagcgcgtcgaatattagatagattggttggctataacatctcgccagttctatggaaaaaagtgaaaaaaggtttgtcagcgggtcgagttcaatctgttgcacttcgtttagtcattgaccgtgaaaatgaaattcgaaactttaaaccagaagaatattggactattgaaggagaatttagatacaaaaaatcaaaattcaatgctaaattccttcattataaaaataaaccttttaaattaaaaacgaaaaaagatgttgagaaaattacagctgcactagatggagatcaattcgaaattacaaacgtgactaaaaaagaaaaaacgcgtaatccagcaaacccatttacaacttctacattacaacaagaggcggcacgtaaattaaactttaaagcaagaaaaacaatgatggtcgcacaacaattatatgaaggtatagatttgaaaaaacaaggtacgattggtttaataacatatatgagaaccgattctacacgtatttcagatactgccaaagctgaagcaaaacagtatataactgataaatacggtgaatcttacacttctaaacgtaaagcatcagggaaacaaggtgaccaagatgcccatgaggctattagaccttcaagtactatgcgtacgccagatgatatgaagtcatttttgacgaaagaccaataccgattatacaaattaatttgggaacgatttgttgctagtcaaatggctccagcaatacttgatacagtctcattagacataacacaaggtgacattaaatttagagcgaatggtcaaacaatcaagtttaaaggatttatgacactttatgtagaaactaaagatgatagtgatagcgaaaaggaaaataaactgcctaaattagagcaaggtgataaagtcacagcaactcaaattgaaccagctcaacactatacacaaccacctccaagatatactgaggcgagattagtaaaaacactagaagaattgaaaattgggcgaccatcaacttatgcaccgacaatagatacgattcaaaagcgtaactatgtcaaattagaaagtaagcgttttgttcctactgagttgggagaaatagttcatgaacaagtgaaagaatacttcccagagattattgatgtggaattcacagtgaatatggaaacgttacttgataagattgcagaaggcgacattacatggagaaaagtaatagacggtttctttagtagctttaaacaagatgttgaacgtgctgaagaagagatggaaaagattgaaatcaaagatgagccagccggtgaagactgtgaagtttgtggttctcctatggttataaaaatgggacgctatggtaagttcatggcttgctcaaacttcccggattgtcgtaatacaaaagcgatagttaagtctattggtgttaaatgtccaaaatgtaatgatggtgacgtcgtagaaagaaaatctaaaaagaatcgtgtcttttatggatgttcgaaatatcctgaatgcgactttatctcttgggataagccgattggaagagattgtccaaaatgtaaccaatatcttgttgaaaataaaaaaggcaagacaacacaagtaatatgttcaaattgcgattataaagaggcagcgcagaaataa

SEQ ID NO: 498 - DNA, 2076 bp, Staphylococcus aureus; identical to SEQ ID NO: 148

SEQ ID NO: 499 - DNA, 603 bp, Staphylococcus aureus
atggctcgattcagaggttcaaactggaaaaaatctcgtcgtttaggtatctctttaagcggtactggtaaagaattagaaaaacgtccttacgcaccaggacaacatggtccaaaccaacgtaaaaaattatcagaatatggtttacaattacgtgaaaaacaaaaattacgttacttatatggaatgactgaaagacaattccgtaacacatttgacatcgctggtaaaaaattcggtgtacacggtgaaaacttcatgattttattagcaagtcgtttagacgctgttgtttattcattaggtttagctcgtactcgtcgtcaagcacgtcaattagttaaccacggtcatatcttagtagatggtaaacgtgttgatattccatcttattctgttaaacctggtcaaacaatttcagttcgtgaaaaatctcaaaaattaaacatcatcgttgaatcagttgaaatcaacaatttcgtacctgagtacttaaactttgatgctgacagcttaactggtactttcgtacgtttaccagaacgtagcgaattacctgctgaaattaacgaacaattaatcgttgagtactactcaagataa

SEQ ID NO: 500 - DNA, 717 bp, Staphylococcus aureus
atgaaatacgctggtattctagctggaggtataggctcaagaatgggtaacgtacctttacctaaacaatttttagatttagacaacaaaccgattttaatccatacattagaaaaatttattttaattaatgattttgaaaaaattattatcgcgacgccacaacaatggatgacgcatacgaaagatacacttagaaaattcaaaatttctgatgaaagaattgaagtcattcaaggtggtagcgatcgtaacgatacaattatgaatatcgttaaacatattgaatcaacaaatggtattaacgatgacgatgtcattgtgacacatgatgcagttagaccatttttaacgcatcgtattattaaagaaaatattcaagctgctttagagtacggtgcagtagatacagtgattgatgctatagatacgattgttacatctaaagataatcaaacgattgatgcaattccagtgcgtaatgaaatgtaccaaggtcaaacacctcaatcgtttaatattaatttattaaaagaaagctatgcacagttgagtgatgagcaaaagagtattttatctgatgcttgtaagattattgtagaaacaaacaaaccggttcgacttgtaaaaggtgagttatataacattaaagtaacaacaccttacgatttaaaagtagcgaatgctattattcgaggtggtattgccgatgattaa

SEQ ID NO: 501 - DNA, 1026 bp, Staphylococcus aureus
atgattaatcaagtatatcaattagttgcacctagacaatttgaagttacgtataacaacgtagatatttacagtgactatgtcattgtacgtcctttatatatgtcaatttgtgctgccgatcaaagatattatactggtagccgtgatgagaatgtcttatctcagaaattgccaatgtctttaattcatgaaggtgttggtgaggtcgtatttgacagtaaaggtgtgtttaataaaggtacaaaagtagttatggtaccgaatacgccgacagaaaaagacgatgtcattgctgaaaactatttaaaatcgagctacttcagatcaagtggacatgatgggtttatgcaagattttgtgttgctaaatcatgatagagctgtaccactacctgatgatattgatttaagtattatttcatatacagagcttgtaacagtaagtttgcatgctattcgtcgttttgaaaagaaatctatttcaaataaaaatacatttggtatttggggtgatggtaacttaggttacattacagccattttattacgtaaattatatccagagtctaaaatatatgtctttggtaaaacagattataaattgagtcacttctcatttgttgatgatgtcttctttattaataaaatacctgaaggcttaacatttgatcatgcatttgagtgcgttggtgggcgtggtagccaatcagcaataaatcaaatgattgattatatttcaccagaaggaagcattgcactgttaggtgtaagtgagttcccagtagaagttaatacacgtctagtattggaaaaaggactaacgttgattggtagtagtcgaagtggttcaaaagatttccaagatgttgtagacttatacattcaatacccagatattgtagataaattagcgttgttaaaaggtcaagaatatgaaattgcaacaattaatgatcttacagaagcttttgaagcagacctgtctacatcttggggtaaaacagtattaaaatggattatgtaa

SEQ ID NO: 502 - DNA, 1722 bp, Staphylococcus aureus
atgatgaaattttcagtaatagttccaacatacaattcagaaaagtatataacagaattacttaatagccttgcgaaacaagattttccgaaaactgaatttgaagtggttgtagttgatgactgttcaacagatcaaacgttacaaatagttgaaaagtatcgcaataaattgaacttgaaagtaagtcaactcgaaacaaattctggtggtccaggtaaacctagaaatgtggcgttaaaacaagcagaaggtgaatttgtattatttgtggactccgatgactatataaacaaagagactttaaaggatgcagcagcatttattgatgaacatcactcagatgtcttattgattaaaatgaaaggtgttaatggtcgtggtgtaccacaatctatgtttaaagaaacagcacctgaagttactttgttaaattcaagaattatctatactttaagcccgactaaaatctatagaacagcattactaaaagataatgacatttattttccagaagaattaaagagtgcagaagatcaattatttacaatgaaagcatatttgaatgcaaatcgaatcagtgtgttaagtgataaagcgtattattatgctacaaagcgtgaaggtgaacatatgagtagtgcgtatgtttcacctgaagacttttacgaagtcatgagattgattgctgtagaaatattaaatgcagatttagaagaagctcataaagatcaaatcttagcagaatttttaaatcgtcattttagtttttctcgtacgaatggcttctcacttaaagttaaacttgaagagcaaccacaatggattaatgctctaggagactttatacaagcagttccagaacgtgtagatgcattggtgatgagtaaattacgaccattgttgcactacgcgagagcgaaagatatagacaactatagaactgtagaagaaagttaccgtcaaggtcaatactaccgttttgatattgtagatggtaaattaaacattcaattcaatgaaggcgaaccatactttgaaggcattgatatcgctaagccaaaagtgaaaatgacagcatttaaatttgataatcataaaattgttacagagctaacgttaaatgaatttatgattggcgaaggacattatgatgtcagacttaaattacattcacgaaacaagaagcacacaatgtatgtacctttaagtgtcaatgcgaataaacaatatcgttttaacattatgttagaagatattaaagcgtatttacctaaagaaaaaatttgggatgttttcttagaagtccaaataggtacggaagtatttgaagtgcgtgttggtaatcaacgtaataaatatgcatatactgcagaaacaagtgcattaattcatttaaataatgatttttatagattaacaccgtatttcacaaaagactttaataacatttcgttatactttacagctattacattaacggattcaatctcaatgaagttaaaaggtaaaaacaaaatcattttaactggtctggatcgtggttatgtatttgaagaaggtatggctagtgtcgtgctaaaagacgacatgattatgggaatgttaagccaaacgtcagaaaacgaagtggaaatcttacttagtaaagatattaagaagcgagacttcaaaaatattgttaagttaaacactgcacatatgacttactcgctaaaataa

SEQ ID NO: 503 - DNA, 348 bp, Staphylococcus aureus
ttggaaaaagcttaccgaattaaaaagaatgcagattttcagagaatatataaaaaaggtcattctgtagccaacagacaatttgttgtatacacttgtaataataaagaaatagaccattttcgcttaggtattagtgtttctaaaaaactaggtaatgcagtgttaagaaacaagattaaaagagcaatacgtgaaaatttcaaagtacataagtcgcatatattggccaaagatattattgtaatagcaagacagccagctaaagatatgacgactttacaaatacagaatagtcttgagcacgtacttaaaattgccaaagtttttaataaaaagattaagtaa

SEQ ID NO: 504 - DNA, 504 bp, Staphylococcus aureus
atgctaaatagagttgtattagtaggtcgtttaacgaaagatccggaatacagaaccactccctcaggtgtgagtgtagcgacattcactcttgcagtaaatcgtacgttcacgaatgctcaaggggagcgcgaagcagattttattaactgtgttgtttttagaagacaagcagataatgtaaataactatttatctaaaggtagtttagctggtgtagatggtcgcttacaatcccgtaattatgaaaatcaagaaggtcgtcgtgtgtttgttactgaagttgtgtgtgatagcgttcaattccttgaacctaaaaatgcgcaacaaaatggtggccaacgtcaacaaaatgaattccaagattacggtcaaggattcggtggtcaacaatcaggacaaaacaattcgtacaataattcatcaaacacgaaacaatctgataatccatttgcaaatgcaaacggaccgattgatataagtgatgatgacttaccattctaa

SEQ ID NO: 505 - DNA, 243 bp, Staphylococcus aureus
atggcaggtggaccaagaagaggcggacgtcgtcgtaaaaaagtatgctatttcacagcaaatggtattacacatatcgactacaaagacactgaattattaaaacgttttatctcagaacgcggtaaaattttaccacgtcgtgtaactggtacttcagctaaatatcaacgtatgttgactacagctatcaaacgttctcgtcatatggcattattaccatatgttaaagaagaacaataa

SEQ ID NO: 506 - DNA, 1278 bp, Staphylococcus aureus; identical to SEQ ID NO: 153

SEQ ID NO: 507 - DNA, 957 bp, Staphylococcus aureus; identical to SEQ ID NO: 154

SEQ ID NO: 508 - DNA, 2079 bp, Staphylococcus aureus; identical to SEQ ID NO: 155

SEQ ID NO: 509 - DNA, 1203 bp, Staphylococcus aureus; identical to SEQ ID NO: 156

SEQ ID NO: 510 - DNA, 861 bp, Staphylococcus aureus; identical to SEQ ID NO: 157

SEQ ID NO: 511 - DNA, 531 bp, Staphylococcus aureus; identical to SEQ ID NO: 158

SEQ ID NO: 512 - DNA, 1806 bp, Staphylococcus aureus; identical to SEQ ID NO: 159

SEQ ID NO: 513 - DNA, 2136 bp, Staphylococcus aureus; identical to SEQ ID NO: 160

SEQ ID NO: 514 - DNA, 1266 bp, Staphylococcus aureus; identical to SEQ ID NO: 161

SEQ ID NO: 515 - DNA, 1555 bp, Staphylococcus aureus
ttttatggagagtttgatcctggctcaggatgaacgctggcggcgtgcctaatacatgcaagtcgagcgaacggacgagaagcttgcttctctgatgttagcggcggacgggtgagtaacacgtggataacctacctataagactgggataacttcgggaaaccggagctaataccggataatattttgaaccgcatggttcaaaagtaaaagacggtcttgctgtcacttatagatggatccgcgctgcattagctagttggtaaggtaacggcttaccaaggcaacgatgcatagccgacctgagagggtgatcggccacactggaactgagacacggtccagactcctacgggaggcagcagtagggaatcttccgcaatgggcgaaagcctgacggagcaacgccgcgtgagtgatgaaggtcttcggatcgtaaaactctgttattagggaagaacatatgtgtaagtaactgtgcacatcttgacggtacctaatcagaaagccacggctaactacgtgccagcagccgcggtaatacgtaggtggcaagcgttatccggaattattgggcgtaaagcgcgcgtaggcggttttttaagtctgatgtgaaagcccacggctcaaccgtggagggtcattggaaactggaaaacttgagtgcagaagaggaaagtggaattccatgtgtagcggtgaaatgcgcagagatatggaggaacaccagtggcgaaggcgactttctggtctgtaactgacgctgatgtgcgaaagcgtggggatcaaacaggattagataccctggtagtccacgccgtaaacgatgagtgctaagtgttagggggtttccgccccttagtgctgcagctaacgcattaagcactccgcctggggagtacgaccgcaaggttgaaactcaaaggaattgacggggacccgcacaagcggtggagcatgtggtttaattcgaagcaacgcgaagaaccttaccaaatcttgacatcctttgacaactctagagatagagccttccccttcgggggacaaagtgacaggtggtgcatggttgtcgtcagctcgtgtcgtgagatgttgggttaagtcccgcaacgagcgcaacccttaagcttagttgccatcattaagttgggcactctaagttgactgccggtgacaaaccggaggaaggtggggatgacgtcaaatcatcatgccccttatgatttgggctacacacgtgctacaatggacaatacaaagggcagcgaaaccgcgaggtcaagcaaatcccataaagttgttctcagttcggattgtagtctgcaactcgactacatgaagctggaatcgctagtaatcgtagatcagcatgctacggtgaatacgttcccgggtcttgtacacaccgcccgtcacaccacgagagtttgtaacacccgaagccggtggagtaaccttttaggagctagccgtcgaaggtgggacaaatgattggggtgaagtcgtaacaaggtagccgtatcggaaggtgcggctggatcacctcctttct

SEQ ID NO: 516 - DNA, 2834 bp, Staphylococcus aureus; identical to SEQ ID NO: 450

SEQ ID NO: 517 - DNA, 115 bp, Staphylococcus aureus; identical to SEQ ID NO: 230

SEQ ID NO: 518 - DNA, 759 bp, Staphylococcus aureus; identical to SEQ ID NO: 163

SEQ ID NO: 519 - DNA, 1263 bp, Staphylococcus aureus; identical to SEQ ID NO: 164

SEQ ID NO: 520 - DNA, 1197 bp, Staphylococcus aureus; identical to SEQ ID NO: 165

SEQ ID NO: 521 - DNA, 1695 bp, Staphylococcus aureus; identical to SEQ ID NO: 166

SEQ ID NO: 522 - DNA, 618 bp, Staphylococcus aureus; identical to SEQ ID NO: 167

SEQ ID NO: 523 - DNA, 921 bp, Staphylococcus aureus; identical to SEQ ID NO: 168

SEQ ID NO: 524 - DNA, 1485 bp, Staphylococcus aureus; identical to SEQ ID NO: 169

SEQ ID NO: 525 - DNA, 1392 bp, Staphylococcus aureus; identical to SEQ ID NO: 170

SEQ ID NO: 526 - DNA, 177 bp, Staphylococcus aureus; identical to SEQ ID NO: 171

SEQ ID NO: 527 - DNA, 1938 bp, Staphylococcus aureus; identical to SEQ ID NO: 172

SEQ ID NO: 528 - DNA, 270 bp, Staphylococcus aureus; identical to SEQ ID NO: 173

SEQ ID NO: 529 - DNA, 1293 bp, Staphylococcus aureus; identical to SEQ ID NO: 174

SEQ ID NO: 530 - DNA, 273 bp, Staphylococcus aureus; identical to SEQ ID NO: 175

SEQ ID NO: 531 - DNA, 1674 bp, Staphylococcus aureus; identical to SEQ ID NO: 176

SEQ ID NO: 532 - DNA, 552 bp, Staphylococcus aureus; identical to SEQ ID NO: 177

SEQ ID NO: 533 - DNA, 1122 bp, Staphylococcus aureus; identical to SEQ ID NO: 178

SEQ ID NO: 534 - DNA, 74 bp, Staphylococcus aureus; identical to SEQ ID NO: 179

SEQ ID NO: 535 - DNA, 1332 bp, Staphylococcus aureus; identical to SEQ ID NO: 180

SEQ ID NO: 536 - DNA, 990 bp, Staphylococcus aureus; identical to SEQ ID NO: 181

SEQ ID NO: 537 - DNA, 876 bp, Staphylococcus aureus; identical to SEQ ID NO: 182

SEQ ID NO: 538 - DNA, 984 bp, Staphylococcus aureus; identical to SEQ ID NO: 183

SEQ ID NO: 539 - DNA, 1125 bp, Staphylococcus aureus; identical to SEQ ID NO: 184

SEQ ID NO: 540 - DNA, 2532 bp, Staphylococcus aureus; identical to SEQ ID NO: 185

SEQ ID NO: 541 - DNA, 993 bp, Staphylococcus aureus; identical to SEQ ID NO: 186

SEQ ID NO: 542 - DNA, 72 bp, Staphylococcus aureus; identical to SEQ ID NO: 187

SEQ ID NO: 543 - DNA, 90 bp, Staphylococcus aureus; identical to SEQ ID NO: 188

SEQ ID NO: 544 - DNA, 1555 bp, Staphylococcus aureus
ttttatggagagtttgatcctggctcaggatgaacgctggcggcgtgcctaatacatgcaagtcgagcgaacggacgagaagcttgcttctctgatgttagcggcggacgggtgagtaacacgtggataacctacctataagactgggataacttcgggaaaccggagctaataccggataatattttgaaccgcatggttcaaaagtgaaagacggtcttgctgtcacttatagatggatccgcgctgcattagctagttggtaaggtaacggcttaccaaggcaacgatgcatagccgacctgagagggtgatcggccacactggaactgagacacggtccagactcctacgggaggcagcagtagggaatcttccgcaatgggcgaaagcctgacggagcaacgccgcgtgagtgatgaaggtcttcggatcgtaaaactctgttattagggaagaacatatgtgtaagtaactgtgcacatcttgacggtacctaatcagaaagccacggctaactacgtgccagcagccgcggtaatacgtaggtggcaagcgttatccggaattattgggcgtaaagcgcgcgtaggcggttttttaagtctgatgtgaaagcccacggctcaaccgtggagggtcattggaaactggaaaacttgagtgcagaagaggaaagtggaattccatgtgtagcggtgaaatgcgcagagatatggaggaacaccagtggcgaaggcgactttctggtctgtaactgacgctgatgtgcgaaagcgtggggatcaaacaggattagataccctggtagtccacgccgtaaacgatgagtgctaagtgttagggggtttccgccccttagtgctgcagctaacgcattaagcactccgcctggggagtacgaccgcaaggttgaaactcaaaggaattgacggggacccgcacaagcggtggagcatgtggtttaattcgaagcaacgcgaagaaccttaccaaatcttgacatcctttgacaactctagagatagagccttcctcttcgggggacaaagtgacaggtggtgcatggttgtcgtcagctcgtgtcgtgagatgttgggttaagtcccgcaacgagcgcaacccttaagcttagttgccatcattaagttgggcactctaagttgactgccggtgacaaaccggaggaaggtggggatgacgtcaaatcatcatgccccttatgatttgggctacacacgtgctacaatggacaatacaaagggcagcgaaaccgcgaggtcaagcaaatcccataaagttgttctcagttcggattgtagtctgcaactcgactacatgaagctggaatcgctagtaatcgtagatcagcatgctacggtgaatacgttcccgggtcttgtacacaccgcccgtcacaccacgagagtttgtaacacccgaagccggtggagtaaccttttaggagctagccgtcgaaggtgggacaaatgattggggtgaagtcgtaacaaggtagccgtatcggaaggtgcggctggatcacctcctttct

SEQ ID NO: 545 - DNA, 2834 bp, Staphylococcus aureus
gattaagttattaagggcgcacggtggatgccttggcactagaagccgatgaaggacgttactaacgacgatatgctttggggagctgtaagtaagctttgatccagagatttccgaatggggaaacccagcatgagttatgtcatgttatcgatatgtgaatacatagcatatcagaaggcacacccggagaactgaaacatcttagtacccggaggaagagaaagaaaattcgattcccttagtagcggcgagcgaaacgggaagagcccaaaccaacaagcttgcttgttggggttgtaggacactctatacggagttacaaaggacgacattagacgaatcatctggaaagatgaatcaaagaaggtaataatcctgtagtcgaaaatgttgtctctcttgagtggatcctgagtacgacggagcacgtgaaattccgtcggaatctgggaggaccatctcctaaggctaaatactctctagtgaccgatagtgaaccagtaccgtgagggaaaggtgaaaagcaccccggaaggggagtgaaatagaacctgaaaccgtgtgcttacaagtagtcagagcccgttaatgggtgatggcgtgccttttgtagaatgaaccggcgagttacgatttgatgcaaggttaagcagtaaatgtggagccgtagcgaaagcgagtctgaatagggcgtttagtatttggtcgtagacccgaaaccaggtgatctacccttggtcaggttgaagttcaggtaacactgaatggaggaccgaaccgacttacgttgaaaagtgagcggatgaactgagggtagcggagaaattccaatcgaacctggagatagctggttctctccgaaatagctttagggctagcctcaagtgatgattattggaggtagagcactgtttggacgaggggcccctctcgggttaccgaattcagacaaactccgaatgccaattaatttaacttgggagtcagaacatgggtgataaggtccgtgttcgaaagggaaacagcccagaccaccagctaaggtcccaaaatatatgttaagtggaaaaggatgtggcgttgcccagacaactaggatgttggcttagaagcagccatcatttaaagagtgcgtaatagctcactagtcgagtgacactgcgccgaaaatgtaccggggctaaacatattaccgaagctgtggattgtcctttggacaatggtaggagagcgttctaagggcgttgaagcatgatcgtaaggacatgtggagcgcttagaagtgagaatgccggtgtgagtagcgaaagacgggtgagaatcccgtccaccgattgactaaggtttccagaggaaggctcgtccgctctgggttagtcgggtcctaagctgaggccgacaggcgtaggcgatggataacaggttgatattcctgtaccacctataatcgttttaatcgatggggggacgcagtaggataggcgaagcgtgcgattggattgcacgtctaagcagtaaggctgagtattaggcaaatccggtactcgttaaggctgagctgtgatggggagaagacattgagtcttcgagtcgttgatttcacactgccgagaaaagcctctagatagaaaataggtgcccgtaccgcaaaccgacacaggtagtcaagatgagaattctaaggtgagcgagcgaactctcgttaaggaactcggcaaaatgaccccgtaacttcgggagaaggggtgctctttagggttaacgcccagaagagccgcagtgaataggcccaagcgactgtttatcaaaaacacaggtctctgctaaaccgtaaggtgatgtataggggctgacgcctgcccggtgctggaaggttaagaggagtggttagcttctgcgaagctacgaatcgaagccccagtaaacggcggccgtaactataacggtcctaaggtagcgaaattccttgtcgggtaagttccgacccgcacgaaaggcgtaacgatttgggcactgtctcaacgagagactcggtgaaatcatagtacctgtgaagatgcaggttacccgcgacaggacggaaagaccccgtggagctttactgtagcctgatattgaaattcggcacagcttgtacaggataggtaggagcctttgaaacgtgagcgctagcttacgtggaggcgctggtgggatactaccctagctgtgttggctttctaacccgcaccacttatcgtggtgggagacagtgtcaagcgggcagtttgactggggcggtcgcctcctaaaaggtaacggaggcgctcaaaggttccctcagaatggttggaaatcattcatagagtgtaaaggcataagggagcttgactgcgagacctacaagtcgagcagggtcgaaagacggacttagtgatccggtggttccgcatggaagggccatcgctcaacggataaaagctaccccggggataacaggcttatctcccccaagagttcacatcgacggggaggtttggcacctcgatgtcggctcatcgcatcctggggctgtagtcggtcccaagggttgggctgttcgcccattaaagcggtacgcgagctgggttcagaacgtcgtgagacagttcggtccctatccgtcgtgggcgtaggaaatttgagaggagctgtccttagtacgagaggaccgggatggacatacctctggtgtaccagttgtcgtgccaacggcatagctgggtagctatgtgtggacgggataagtgctgaaagcatctaagcatgaagcccccctcaagatgagatttcccaacttcggttataagatc

SEQ ID NO: 546 - DNA, 115 bp, Staphylococcus aureus; identical to SEQ ID NO: 230

SEQ ID NO: 547 - DNA, 1455 bp, Staphylococcus aureus; identical to SEQ ID NO: 190

SEQ ID NO: 548 - DNA, 1287 bp, Staphylococcus aureus; identical to SEQ ID NO: 191

SEQ ID NO: 549 - DNA, 618 bp, Staphylococcus aureus
atgccttttacaccaaatgaaattaagaataaagagttttcacgtgtaaagaatggtttagaacctactgaagttgctaattttttggagcaactaagcactgaaattgaacgtcttaaagaagataaaaaacaacttgaaaaagtaatcgaagagagagatactaatattaagtcttatcaagacgtgcatcaatctgtaagtgatgctttgatacaagctcaaaaagctggtgaagaaactaagcaagctgcagagaaacaagctgaagcgattatagctaaggcagaagcgcaagctaatcaaatggttggtgacgcggtagaaaaagcacgccgtttagcattccagactgaagatatgaaacgtcaatcaaaagtatttagatcgcgtttccgtatgttagttgaagcgcaattagacttattaaaaaacgaagattgggattacttgttgaattatgatttagacgctgaacaagtgacgcttgaaaatattcatcatttgcatgaaaatgatttaaagccagatgaagttgcagcaaatgcacaaaataatgcatcaaatacaccagacaataatcaacaatccaatgattcagaaacaactaagaagtaa

SEQ ID NO: 550 - DNA, 2754 bp, Staphylococcus aureus; identical to SEQ ID NO: 194

SEQ ID NO: 551 - protein, 644 aa, Staphylococcus aureus
MVTALSDVNNTDNYGAGQIQVLEGLEAVRKRPGMYIGSTSERGLHHLVWEIVDNSIDEALAGYANKIEVVIEKDNWIKVTDNGRGIPVDIQEKMGRPAVEVILTVLHAGGKFGGGGYKVSGGLHGVGSSVVNALSQDLEVYVHRNETIYHQAYKKGVPQFDLKEVGTTDKTGTVIRFKADGEIFTETTVYNYETLQQRIRELAFLNKGIQITLRDERDEENVREDSYHYEGGIKSYVELLNENKEPIHDEPIYIHQSKDDIEVEIAIQYNSGYATNLLTYANNIHTYEGGTHEDGFKRALTRVLNSYGLSSKIMKEEKDRLSGEDTREGMTAIISIKHGDPQFEGQTKTKLGNSEVRQVVDKLFSEHFERFLYENPQVARTVVEKGIMAARARVAAKKAREVTRRKSALDVASLPGKLADCSSKSPEECEIFLVEGDSAGGSTKSGRDSRTQAILPLRGKILNVEKARLDRILNNNEIRQMITAFGTGIGGDFDLAKARYHKIVIMTDADVDGAHIRTLLLTFFYRFMRPLIEAGYVYIAQPPLYKLTQGKQKYYVYNDRELDKLKSELNPTPKWSIARYKGLGEMNADQLWETTMNPEHRALLQVKLEDAIEADQTFEMLMGDVVENRRQFIEDNAVYANLDF

SEQ ID NO: 552 - protein, 889 aa, Staphylococcus aureus
MAELPQSRINERNITSEMRESFLDYAMSVIVARALPDVRDGLKPVHRRILYGLNEQGMTPDKSYKKSARIVGDVMGKYHPHGDLSIYEAMVRMAQDFSYRYPLVDGQGNFGSMDGDGAAAMRYTEARMTKITLELLRDINKDTIDFIDNYDGNEREPSVLPARFPNLLANGASGIAVGMATNIPPHNLTELINGVLSLSKNPDISIAELMEDIEGPDFPTAGLILGKSGIRRAYETGRGSIQMRSRAVIEERGGGRQRIVVTEIPFQVNKARMIEKIAELVRDKKIDGITDLRDETSLRTGVRVVIDVRKDANASVILNNLYKQTPLQTSFGVNMIALVNGRPKLINLKEALVHYLEHQKTVVRRRTQYNLRKAKDRAHILEGLRIALDHIDEIISTIRESDTDKVAMKSLQQRFKLSEKQAQAILDMRLRRLTGLERDKIEAEYNELLNYISELETILADEEVLLQLVRDELTEIRDRFGDDRRTEIQLGGFEDLEDEDLIPEEQIVITLSHNNYIKRLPVSTYRAQNRGGRGVQGMNTLEEDFVSQLVTLSTHDHVLFFTNKGRVYKLKGYEVPELSRQSKGIPVVNAIELENDEVISTMIAVKDLESEDNFLVFATKRGVVKRSALSNFSRINRNGKIAISFREDDELIAVRLTSGQEDILIGTSHASLIRFPESTLRPLGRTATGVKGITLREGDEVVGLDVAHANSVDEVLVVTENGYGKRTPVNDYRLSNRGGKGIKTATITERNGNVVCITTVTGEEDLMIVTNAGVIIRLDVADISQNGRAAQGVRLIRLGDDQFVSTVAKVKEDAEDETNEDEQSTSTVSEDGTEQQREAVVNDETPGNAIHTEVIDSEENDEDGRIEVRQDFMDRVEEDIQQSSDEDEE

SEQ ID NO: 553 - protein, 546 aa, Staphylococcus aureus
MSKEIDWRKSVVYQIYPKSFNDTTGNGIGDINGIIEKLDYIKLLGVDYIWLTPVYESPMNDNGYDISNYLEINEAFGTMDDFEKLIKVAHQKDLKVMLDIVINHTSTEHEWFKEARKSKDNPYRDYYFFRSSEDGPPTNWHSKFGGNAWKYDSETDEYYLHLFDVSQADLNWDNPEVRQSLYRIVNHWIDFGVDGFRFDVINLISKGEFKDSDKIGKEFYTDGPRVHEFLHELNRQTFGNTDMMTVGEMSSTTIENCIKYTQPERQELNSVFNFHHLKVDYVDGEKWTNAKLDFHKLKEILMQWQRGIYDGGGWNAIFWCNHDQPRVVSRFGDDTSEEMRIQSAKMLAIALHMLQGTPYIYQGEEIGMTDPHFTSIAQYRDVESINAYHQLLSEGHAEADVLAILGQKSRDNSRTPMQWSDDVNAGFTAGKPWIDISENYHQVNVRQALQNKESIFYTYQKLIQLRHTHDIITYGDIVPRFMDHDHLFVYERHYKNQQWLVIANFSASAVDLPEGLAREGCVVIQTGTVENNTISGFGAIVIETNA

SEQ ID NO: 554 - protein, 565 aa, Staphylococcus aureus
MNYQALYRMYRPQSFEDVVGQEHVTKTLRNAISKEKQSHAYIFSGPRGTGKTSIAKVFAKAINCLNSTDGEPCNECHICKGITQGTNSDVIEIDAASNNGVDEIRNIRDKVKYAPSESKYKVYIIDEVHMLTTGAFNALLKTLEEPPAHAIFILATTEPHKIPPTIISRAQRFDFKAISLDQIVERLKFVADAQQIECEDEALAFIAKASEGGMRDALSIMDQAIAFGDGTLTLQDALNVTGSVHDEALDHLFDDIVQGDVQASFKKYHQFITEGKEVNRLINDMIYFVRDTIMNKTSEKDTEYRALMNLELDMLYQMIDLINDTLVSIRFSVNQNVHFEVLLVKLAEQIKGQPQVIANVAEPAQIASSPNTDVLLQRMEQLEQELKTLKAQGVSVAPAQKSSKKPARGIQKSKNAFSMQQIAKVLDKANKADIKLLKDHWQEVIDHAKNNDKKSLVSLLQNSEPVAASEDHVLVKFEEEIHCEIVNKDDEKRSSIESVVCNIVNKNVKVVGVPSDQWQRVRTEYLQNRKNEGDDMPKQQAQQTDIAQKAKDLFGEETVHVIDEE

SEQ ID NO: 555 - protein, 105 aa, Staphylococcus aureus
MRGGGNMQQMMKQMQKMQKKMAQEQEKLKEERIVGTAGGGMVAVTVTGHKEVVDVEIKEEAVDPDDIEMLQDLVLAATNEAMNKADELTQERLGKHTQGLNIPGM

SEQ ID NO: 556 - protein, 205 aa, Staphylococcus aureus [sequence omitted]

SEQ ID NO: 557 - protein, 308 aa, Staphylococcus aureus
MDEQQQLTNAYHSNKLSHAYLFEGDDAQTMKQVAINFAKLILCQTDSQCETKVSTYNHPDFMYISTTENAIKKEQVEQLVRHMNQLPIESTNKVYIIEDFEKLTVQGENSILKFLEEPPDNTIAILLSTKPEQILDTIHSRCQHVYFKPIDKEKFINRLVEQNMSKPVAEMISTYTTQIDNAIALNEEFDLLALRKSVIRWCELLLTNKPMALIGIIDLLKQAKNKKLQSLTIAAVNGFFEDIIHTKVNVEDKQIYSDLKNDIDQYAQKLSFNQLILMFDQLTEAHKKLNQNVNPTLVFEQIVIKGVS

SEQ ID NO: 558 - protein, 279 aa, Staphylococcus aureus
MAVLYLVGTPIGNLADITYRAVDVLKRVDMIACEDTRVTSKLCNHYDIPTPLKSYHEHNKDKQTAFIIEQLELGLDVALVSDAGLPLISDPGYELVVAAREANIKVETVPGPNAGLTALMASGLPSYVYTFLGFLPRKEKEKSAVLEQRMHENSTLIIYESPHRVTDTLKTIAKIDATRQVSLGRELTKKFEQIVTDDVTQLQALIQQGDVPLKGEFVILIEGAKANNEISWFDDLSINEHVDHYIQTSQMKPKQAIKKVAEERQLKTNEVYNIYHQIS

SEQ ID NO: 559 - protein, 657 aa, Staphylococcus aureus
MAKETFYITTPIYYPSGNLHIGHAYSTVAGDVIARYKRMQGYDVRYLTGTDEHGQKIQEKAQKAGKTEIEYLDEMIAGIKQLWAKLEISNDDFIRTTEERHKHVVEQVFERLLKQGDIYLGEYEGWYSVPDETYYTESQLVDPQYENGKIIGGKSPDSGHEVELVKEESYFFNISKYTDRLLEFYDQNPDFIQPPSRKNEMINNFIKPGLADLAVSRTSFNWGVHVPSNPKHVVYVWIDALVNYISALGYLSDDESLFNKYWPADIHLMAKEIVRFHSIIWPILLMALDLPLPKKVFAHGWILMKDGKMSKSKGNVVDPNILIDRYGLDATRYYLMRELPFGSDGVFTPEAFVERTNFDLANDLGNLVNRTISMVNKYFDGELPAYQGPLHELDEEMEAMALETVKSYTESMESLQFSVALSTVWKFISRTNKYIDETTPWVLAKDDSQKDMLGNVMAHLVENIRYAAVLLRPFLTHAPKEIFEQLNINNPQFMEFSSLEQYGVLTESIMVTGQPKPIFPRLDSEAEIAYIKESMQPPATEEEKEEIPSKPQIDIKDFDKVEIKAATIIDAEHVKKSDKLLKIQVDLDSEQRQIVSGIAKFYTPDDIIGKKVAVVTNLKPAKLMGQKSEGMILSAEKDGVLTLVSLPSAIPNGAVIK

SEQ ID NO: 560 - protein, 190 aa, Staphylococcus aureus
MKCIVGLGNIGKRFELTRHNIGFEVVDYILEKNNFSLDKQKFKGAYTIERMNGDKVLFIEPMTMMNLSGEAVAPIMDYYNVNPEDLIVLYDDLDLEQGQVRLRQKGSAGGHNGMKSIIKMLGTDQFKRIRIGVGRPTNGMTVPDYVLQRFSNDEMVTMEKVIEHAARAIEKFVETSRFDHVMNEFNGEVK

SEQ ID NO: 561 - protein, 87 aa, Staphylococcus aureus
MRLDKYLKVSRLIKRRTLAKEVSDQGRITINGNVAKAGSDVKVEDVLTIRFGQKLVTVKVTALNEHASKDNAKGMYEIIEERRLEEA

SEQ ID NO: 562 - protein, 130 aa, Staphylococcus aureus
MKNKVEHIENQYTSQENKKKQRQKMKMRVVRRRITVFAGVLLAIIVVLSILLVVQKHRNDIDAQERKAKEAQFQKQQNEEIALKEKLNNLNDKDYIEKIARDDYYLSNKGEVIFRLPEDKDSSSSKSSKK

SEQ ID NO: 563 - protein, 431 aa, Staphylococcus aureus
MQLNSNGWHVDDHIVVAVSTGIDSMCLLYQLLNDYKDSYRKLTCLHVNHGVRSASIEEARFLEAYCERHHIDLHIKKLDLSHSLDRNNSIQNEARIKRYEWFDEMMNVLEADVLLTAHHLDDQLETIMYRIFNGKSTRNKLGFDELSKRKGYQIYRPLLAVSKKEIKQFQERYHIPYFEDESNKDNKYIRNDIRNRIIPAIDENNQLKVSHLLKLKQWHDEQYDILQYSAKQFIQEFVKFDEQSKYLEVSRQAFNNLPNSLKMVVLDCLLSKYYELFNISAKTYEEWFKQFSSKKAQFSINLTDKWIIQIAYGKLIIMAKNNGDTYFRVQTIKKPGNYFFNKYRLEIHSNLPKCLFPLTVRTRQSGDTFKLNGRDGYKKVNRLFIDCKVPQWVRDQMPIVLDKQQRIIAVGDLYQQQTIKKWIIISKNGDE

SEQ ID NO: 564 - protein, 179 aa, Staphylococcus aureus
MHNDLKEVLLTEEDIQNICKELGAQLTKDYQGKPLVCVGILKGSAMFMSDLIKRIDTHLSIDFMDVSSYHGGTESTGEVQIIKDLGSSIENKDVLIIEDILETGTTLKSITELLQSRKVNSLEIVTLLDKPNRRKADIEAKYVGKKIPDEFVVGYGLDYRELYRNLPYIGTLKPEVYSN

SEQ ID NO: 565 - protein, 267 aa, Staphylococcus aureus
MTKTKIMGILNVTPDSFSDGGKFNNVETAINRVKAMIDEGADIIDVGGVSTRPGHEMVTLEEELNRVLPVVEAIVGFDVKISVDTFRSEVAEACLKLGVDMINDQWAGLYDHRMFQIVAKYDAEIILMHNGNGNRDEPVVEEMLTSLLAQAHQAKIAGIPSNKIWLDPGIGFAKTRNEEAEVMARLDELVATEYPVLLATSRKRFTKEMMGYDTTPVERDEVTAATTAYGIMKGVRAVRVHNVELNAKLAKGIDFLKENENARHNLS

SEQ ID NO: 566 - protein, 121 aa, Staphylococcus aureus
MQDTIFLKGMRFYGYHGALSAENEIGQIFKVDVTLKVDLAEAGRTDNVIDTVHYGEVFEEVKSIMEGKAVNLLEHLAERIANRINSQYNRVMETKVRITKENPPIPGHYDGVGIEIVRENK

SEQ ID NO: 567 - protein, 158 aa, Staphylococcus aureus
MIQAYLGLGSNIGDRESQLNDAIKILNEYDGISVSNISPIYETAPVGYTEQPNFLNLCVEIQTTLTVLQLLECCLKTEECLHRIRKERWGPRTLDVDILLYGEEMIDLPKLSVPHPRMNERAFVLIPLNDIAANVVEPRSKLKVKDLVFVDDSVKRYK

SEQ ID NO: 568 - protein, 608 aa, Staphylococcus aureus
MKRLGMERFKMITLYNTLTRQKEVFKPIEPGKVKMYVCGPTVYNYIHIGNARPAINYDVVRRYFEYQGYNVEYVSNFTDVDDKLIKRSQELNQSVPEIAEKYIAAFHEDVGALNVRKATSNPRVMDHMDDIIQFIKDLVDQGYAYESGGDVYFRTRKFEGYGKLSHQSIDDLKVGARIDAGEHKEDALDFTLWKKAKPGEISWNSPFGEGRPGWHIECSVMAFHELGPTIDIHAGGSDLQFPHHENEIAQSEAHNHAPFANYWMHNGFINIDNEKMSKSLGNFILVHDIIKEVDPDVLRFFMISVHYRSPINYNLELVESARSGLERIRNSYQLIEERAQIATNIENQQTYIDQIDAILNRFETVMNDDFNTANAITAWYDLAKLANKYVLENTTSTEVIDKFKAVYQIFSDVLGVPLKSKNADELLDEDVEKLIEERNEARKNKDFARADEIRDMLKSQNIILEDTPQGVRFKRGYQQDNHIKLLNPLTLAYMGDAVLDQYVRTYIVLKLKSKPNKLHQMSKKYVSAKSQAQTLEYLMEQEWFTDEEMDILKRGRNAKSHTKAKNTDVQTYRKSSAIEAVIGFLYLEKREERLEALLNKIITIVNER

SEQ ID NO: 569 - protein, 140 aa, Staphylococcus aureus
MAKKVDKVVKLQIPAGKANPAPPVGPALGQAGVNIMGFCKEFNARTQDQAGLIIPVEISVYEDRSFTFITKTPPAPVLLKKAAGIEKGSGEPNKTKVATVTKDQVREIANSKMQDLNAADEEAAMRIIEGTARSMGIVVE

SEQ ID NO: 570 - protein, 166 aa, Staphylococcus aureus
MSAIIEAKKQLVDEIAEVLSNSVSTVIVDYRGLTVAEVTDLRSQLREAGVEYKVYKNTMVRRAAEKAGIEGLDEFLTGPTAIATSSEDAVAAAKVISGFAKDHEALEIKSGVMEGNVITAEEVKTVGSLPSHDGLVSMLLSVLQAPVRNFAYAVKAIGEQKEENAE

SEQ ID NO: 571 - protein, 122 aa, Staphylococcus aureus
MANHEQIIEAIKEMSVLELNDLVKAIEEEFGVTAAAPVAVAGAAGGADAAAEKTEFDVELTSAGSSKIKVVKAVKEATGLGLKDAKELVDGAPKVIKEALPKEEAEKLKEQLEEVGATVELK

SEQ ID NO: 572 - protein, 1183 aa, Staphylococcus aureus
MAGQVVQYGRHRKRRNYARISEVLELPNLIEIQTKSYEWFLREGLIEMFRDISPIEDFTGNLSLEFVDYRLGEPKYDLEESKNRDATYAAPLRVKVRLIIKETGEVKEQEVFMGDFPLMTDTGTFVINGAERVIVSQLVRSPSVYFNEKIDKNGRENYDATIIPNRGAWLEYETDAKDVVYVRIDRTRKLPLTVLLRALGFSSDQEIVDLLGDNEYLRNTLEKDGTENTEQALLEIYERLRPGEPPTVENAKSLLYSRFFDPKRYDLASVGRYKTNKKLHLKHRLFNQKLAEPIVNTETGEIVVEEGTVLDRRKIDEIMDVLESNANSEVFELHGSVIDEPVEIQSIKVYVPNDDEGRTTTVIGNAFPDSEVKCITPADIIASMSYFFNLLSGIGYTDDIDHLGNRRLRSVGELLQNQFRIGLSRMERVVRERMSIQDTESITPQQLINIRPVIASIKEFFGSSQLSQFMDQANPLAELTYKRRLSALGPGGLTRERAQMEVRDVHYSHYGRMCPIETPEGPNIGLINSLSSYARVNEFGFIETPYRKVDLDTHAITDQIDYLTADEEDSYVVAQANSKLDENGRFMDDEVVCRFRGNNTVMAKEKMDYMDVSPKQVVSAATACIPFLENDDSNRALMGANMQRQAVPLMNPEAPFVGTGMEHVAARDSGAAITAKHRGRVEHVESNEILVRRLVEENGVEHEGELDRYPLAKFKRSNSGTCYNQRPIVAVGDVVEYNEILADGPSMELGEMALGRNVVVGFMTWDGYNYEDAVIMSERLVKDDVYTSIHIEEYESEARDTKLGPEEITRDIPNVSESALKNLDDRGIVYIGAEVKDGDILVGKVTPKGVTELTAEERLLHAIFGEKAREVRDTSLRVPHGAGGIVLDVKVFNREEGDDTLSPGVNQLVRVYIVQKRKIHVGDKMCGRHGNKGVISKIVPEEDMPYLPDGRPIDIMLNPLGVPSRMNIGQVLELHLGMAAKNLGIHVASPVFDGANDDDVWSTIEEAGMARDGKTVLYDGRTGEPFDNRISVGVMYMLKLAHMVDDKLHARSTGPYSLVTQQPLGGKAQFGGQRFGEMEVWALEAYGAAYTLQEILTYKSDDTVGRVKTYEAIVKGENISRPSVPESFRVLMKELQSLGLDVKVMDEQDNEIEMTDVDDDDVVERKVDLQQNDAPETQKEVTD

SEQ ID NO: 573 - protein, 1207 aa, Staphylococcus aureus
MIDVNNFHYMKIGLASPEKIRSWSFGEVKKPETINYRTLKPEKDGLFCERIFGPTKDWECSCGKYKRVRYKGMVCDRCGVEVTKSKVRRERMGHIELAAPVSHIWYFKGIPSRMGLLLDMSPRALEEVIYFASYVVVDPGPTGLEKKTLLSEAEFRDYYDKYPGQFVAKMGAEGIKDLLEEIDLDEELKLLRDELESATGQRLTRAIKRLEVVESFRNSGNKPSWMILDVLPIIPPEIRPMVQLDGGRFATSDLNDLYRRVINRNNRLKRLLDLGAPGIIVQNEKRMLQEAVDALIDNGRRGRPVTGPGNRPLKSLSHMLKGKQGRFRQNLLGKRVDYSGRSVIAVGPSLKMYQCGLPKEMALELFKPFVMKELVQREIATNIKNAKSKIERMDDEVWDVLEEVIREHPVLLNRAPTLHRLGIQAFEPTLVEGRAIRLHPLVTTAYNADFDGDQMAVHVPLSKEAQAEARMLMLAAQNILNPKDGKPVVTPSQDMVLGNYYLTLERKDAVNTGAIFNNTNEVLKAYANGFVHLHTRIGVHASSFNNPTFTEEQNKKILATSVGKIIFNEIIPDSFAYINEPTQENLERKTPNRYFIDPTTLGEGGLKEYFENEELIEPFNKKFLGNIIAEVFNRFSITDTSMMLDRMKDLGFKFSSKAGITVGVADIVVLPDKQQILDEHEKLVDRITKQFNRGLITEEERYNAVVEIWTDAKDQIQGELMQSLDKTNPIFMMSDSGARGNASNFTQLAGMRGLMAAPSGKIIELPITSSFREGLTVLEYFISTHGARKGLADTALKTADSGYLTRRLVDVAQDVIVREEDCGTDRGLLVSDIKEGTEMIEPFIERIEGRYSKETIRHPETDEIIIRPDELITPEIAKKITDAGIEQMYIRSAFTCNARHGVCEKCYGKNLATGEKVEVGEAVGTIAAQSIGEPGTQLTMRTFHTGGVAGSDITQGLPRIQEIFEARNPKGQAVITEIEGVVEDIKLAKDRQQEIVVKGANETRSYLASGTSRIIVEIGQPVQRGEVLTEGSIEPKNYLSVAGLNATESYLLKEVQKVYRMQGVEIDDKHVEVMVRQMLRKVRIIEAGDTKLLPGSLVDIHNFTDANREAFKHRKRPATAKPVLLGITKASLETESFLSAASFQETTRVLTDAAIKGKRDDLLGLKENVIIGKLIPAGTGMRRYSDVKYEKTAKPVAEVESQTEVTE

SEQ ID NO: 574 - protein, 137 aa, Staphylococcus aureus
MPTINQLVRKPRQSKIKKSDSPALNKGFNSKKKKFTDLNSPQKRGVCTRVGTMTPKKPNSALRKYARVRLSNNIEINAYIPGIGHNLQEHSVVLVRGGRVKDLPGVRYHIVRGALDTSGVDGRRQGRSLYGTKKPKN

SEQ ID NO: 575 - protein, 156 aa, Staphylococcus aureus
MPRKGSVPKRDVLPDPIHNSKLVTKLINKIMLDGKRGTAQRILYSAFDLVEQRSGRDALEVFEEAINNIMPVLEVKARRVGGSNYQVPVEVRPERRTTLGLRWLVNYARLRGEKTMEDRLANEILDAANNTGGAVKKREDTHKMAEANKAFAHYRW

SEQ ID NO: 576 - protein, 693 aa, Staphylococcus aureus
MAREFSLEKTRNIGIMAHIDAGKTTTTERILYYTGRIHKIGETHEGASQMDWMEQEQDRGITITSAATTAAWEGHRVNIIDTPGHVDFTVEVERSLRVLDGAVTVLDAQSGVEPQTETVWRQATTYGVPRIVFVNKMDKLGANFEYSVSTLHDRLQANAAPIQLPIGAEDEFEAIIDLVEMKCFKYTNDLGTEIEEIEIPEDHLDRAEEARASLIEAVAETSDELMEKYLGDEEISVSELKEAIRQATTNVEFYPVLCGTAFKNKGVQLMLDAVIDYLPSPLDVKPIIGHRASNPEEEVIAKADDSAEFAALAFKVMTDPYVGKLTFFRVYSGTMTSGSYVKNSTKGKRERVGRLLQMHANSRQEIDTVYSGDIAAAVGLKDTGTGDTLCGEKNDIILESMEFPEPVIHLSVEPKSKADQDKMTQALVKLQEEDPTFHAHTDEETGQVIIGGMGELHLDILVDRMKKEFNVECNVGAPMVSYRETFKSSAQVQGKFSRQSGGRGQYGDVHIEFTPNETGAGFEFENAIVGGVVPREYIPSVEAGLKDAMENGVLAGYPLIDVKAKLYDGSYHDVDSSEMAFKIAASLALKEAAKKCDPVILEPMMKVTIEMPEEYMGDIMGDVTSRRGRVDGMEPRGNAQVVNAYVPLSEMFGYATSLRSNTQGRGTYTMYFDHYAEVPKSIAEDIIKKNKGE

SEQ ID NO: 577 - protein, 394 aa, Staphylococcus aureus
MAKEKFDRSKEHANIGTIGHVDHGKTTLTAAIATVLAKNGDSVAQSYDMIDNAPEEKERGITINTSHIEYQTDKRHYAHVDCPGHADYVKNMITGAAQMDGGILVVSAADGPMPQTREHILLSRNVGVPALVVFLNKVDMVDDEELLELVEMEVRDLLSEYDFPGDDVPVIAGSALKALEGDAQYEEKILELMEAVDTYIPTPERDSDKPFMMPVEDVFSITGRGTVATGRVERGQIKVGEEVEIIGLHDTSKTTVTGVEMFRKLLDYAEAGDNIGALLRGVAREDVQRGQVLAAPGSITPHTEFKAEVYVLSKDEGGRHTPFFSNYRPQFYFRTTDVTGVVHLPEGTEMVMPGDNVEMTVELIAPIAIEDGTRFSIREGGRTVGSGVVTEIIK

SEQ ID NO: 578 - protein, 328 aa, Staphylococcus aureus
MADLLNVLKDKLSGKNVKIVLPEGEDERVLTAATQLQATDYVTPIVLGDETKVQSLAQKLDLDISNIELINPATSELKAELVQSFVERRKGKATEEQAQELLNNVNYFGTMLVYAGKADGLVSGAAHSTGDTVRPALQIIKTKPGVSRTSGIFFMIKGDEQYIFGDCAINPELDSQGLAEIAVESAKSALSFGMDPKVAMLSFSTKGSAKSDDVTKVQEAVKLAQQKAEEEKLEAIIDGEFQFDAAIVPGVAEKKAPGAKLQGDANVFVFPSLEAGNIGYKIAQRLGGYDAVGPVLQGLNSPVNDLSRGCSIEDVYNLSIITAAQALQ

SEQ ID NO: 579 - protein, 279 aa, Staphylococcus aureus
MAVPFNAGKIKVLIEALESGNYSSIKSDVYDGMLYDAPDHLKSLVNRFVELNNITEPLAVTIQTNLPPSRGLGSSAAVAVAFVRASYDFLGKSLTKEELIEKANWAEQIAHGKPSGIDTQTIVSGKPVWFQKGHAETLKTLSLDGYMVVIDTGVKGSTRQAVEDVHKLCEDPQYMSHVKHIGKLVLRASDVIEHHNFEALADIFNECHADLKALTVSHDKIEQLMKIGKENGAIAGKLTGAGRGGSMLLLAKDLPTAKNIVKAVEKAGAAHTWIENLGG

SEQ ID NO: 580 - protein, 327 aa, Staphylococcus aureus
MIKSGKARAHTNIALIKYWGKKDEALIIPMNNSISVTLEKFYTETKVTFNDQLTQDQFWLNGEKVSGKELEKISKYMDIVRNRAGIDWYAEIESDNFVPTAAGLASSASAYAALAAACNQALDLQLSDKDLSRLARIGSGSASRSIYGGFAEWEKGYNDETSYAVPLESNHFEDDLAMIFVVINQHSKKVPSRYGMSLTRNTSRFYQYWLDHIDEDLAEAKAAIQDKDFKRLGEVIEENGLRMHATNLGSTPPFTYLVQESYDVMALVHECREAGYPCYFTMDAGPNVKILVEKKNKQQIIDKLLTQFDNNQIIDSDIIATGIEIIE

SEQ ID NO: 581 - protein, 358 aa, Staphylococcus aureus
MIQVKAPGKLYIAGEYAVTEPGYKSVLIALDRFVTATIEEADQYKGTIHSKALHHNPVTFSRDEDSIVISDPHAAKQLNYVVTAIEIFEQYAKSCDIAMKHFHLTIDSNLDDSNGHKYGLGSSAAVLVSVIKVLNEFYDMKLSNLYIYKLAVIANMKLQSLSSCGDIAVSVYSGWLAYSTFDHEWVKHQIEDTTVEEVLIKNWPGLHIEPLQAPENMEVLIGWTGSPASSPHFVSEVKRLKSDPSFYGDFLEDSHRCVEKLIHAFKTNNIKGVQKMVRQNRTIIQRMDKEATVDIETEKLKYLCDIAEKYHGASKTSGAGGGDCGITIINKDVDKEKIYDEWTKHGIKPLKFNIYHGQ

SEQ ID NO: 582 - protein, 553 aa, Staphylococcus aureus
MNIIDQVKQTLVEEIAASINKAGLADEIPDIKIEVPKDTKNGDYATNIAMVLTKIAKRNPREIAQAIVDNLDTEKAHVKQIDIAGPGFINFYLDNQYLTAIIPEAIEKGDQFGHVNESKGQNVLLEYVSANPTGDLHIGHARNAAVGDALANILTAAGYNVTREYYINDAGNQITNLARSIETHFFEALGDNSYSMPEDGYNGKDIIEIGKDLAEKHPEIKDYSEEARLKEFRKLGVEYEMAKLKNDLAEFNTHFDNWFSETSLYEKGEILEVLAKMKELGYTYEADGATWLRTTDFKDDKDRVLIKNDGTYTYFLPDIAYHFDKVKRGNDILIDLFGADHHGYINRLKASLETFGVDSNRLEIQIMQMVRLMENGKEVKMSKRTGNAITLREIMDEVGVDAARYFLTMRSPDSHFDFDMELAKEQSQDNPVYYAQYAHARICSILKQAKEQGIEVTAANDFTTITNEKAIELLKKVADFEPTIESAAEHRSAHRITNYIQDLAAHFHKFYNAEKVLTDDIEKTKAHVAMIEAVRITLKNALAMVGVSAPESM

SEQ ID NO: 583 - protein, 247 aa, Staphylococcus aureus
MLETKDLNLFLGNKHVLKNISLSIPVRGEIIGIMGPNGAGKSSLIKSLIGEFNATGTKLLYNKPIQQQLQHITYIPQKAHIDLDFPISVEQVILSGCYKEIGWFRRPNKSARDKLKQLLSDLELESLRHRQISELSGGQLQRVLVARALMSESEVYFLDEPFVGIDFSSEKLIMTKIENLKQQGKLILIIHHDLSKAKQYFDRIILLNQTLRYFGDSEEAMSVTRLNETFMSSTDCSDPSQRSNITC

SEQ ID NO: 584 - protein, 253 aa, Staphylococcus aureus
MIITEKRHELILEELSHKDFLTLQELIDRTGCSASTIRRDLSKLQQLGKLQRVHGGAMLKENRMIEANLTEKLATNLDEKKMIAKIAANQINDNECLFIDAGSSTLELIKYIQAKDIIVVTNGLTHVEALLKKGIKTIMLGGQVKENTLATIGSSAMEILRRYCFDKAFIGMNGLDIELGLTTPDEQEALVKQTAMSLANQSFVLIDHSKFNKVYFARVPLLESTTIITSEKALNQESLKEYQQKYHFIGGTL

SEQ ID NO: 585 - protein, 718 aa, Staphylococcus aureus
MEKTKTLLNLRTRWVILMKTMEEKKYNHIELNNEVTKRREDGFFSLEKDQEALVAYLEEVKDKTIFFDTEIERLRYLVDNDFYFNVFDIYSEADLIEITDYAKSISFNFASYMSASKFFKDYALKTNDKSQYLEDYNQHVAIVALYLANGNKAQAKQFISAMVEQRYQPATPTFLNAGRARRGELVSCFLLEVDDSLNSINFIDSTAKQLSKIGGGVAINLSKLRARGEAIKGIKGVAKGVLPIAKSLEGGFSYADQLGQRPGAGAVYLNIFHYDVEEFLDTKKVNADEDLRLSTISTGLIVPSKFFDLAKEGKDFYMFAPHTVKEEYGVTLDDIDLEKYYDDMVANPNVEKKKKNAREMLNLIAQTQLQSGYPYLMFKDNANRVHPNSNIGQIKMSNLCTEIFQLQETSIINDYGIEDEIKRDISCNLGSLNIVNVMESGKFRDSVHSGMDALTVVSDVANIQNAPGVRKANSELHSVGLGVMNLHGYLAKNKIGYESEEAKDFANIFFMMMNFYSIERSMEIAKERGIKYQDFEKSDYANGKYFEFYTTQEFEPQFEKVRELFDGMAIPTSEDWKKLQQDVEQYGLYHAYRLAIAPTQSISYVQNATSSVMPIVDQIERRTYGNAETFYPMPFLSPQTMWYYKSAFNTDQMKLIDLIATIQTHIDQGISTILYVNSEISTRELARLYVYAHYKGLKSLYYTRNKLLSVEECTSCSI

SEQ ID NO: 586 - protein, 323 aa, Staphylococcus aureus
MIAVNWNTQEDMTNMFWRQNISQMWVETEFKVSKDIASWKTLSEAEQDTFKKALAGLTGLDTHQADDGMPLVMLHTTDLRKKAVYSFMAMMEQIHAKSYSHIFTTLLPSSETNYLLDEWVLEEPHLKYKSDKIVANYHKLWGKEASIYDQYMARVTSVFLETFLFFSGFYYPLYLAGQGKMTTSGEIIRKILLDESIHGVFTGLDAQHLRNELSESEKQKADQEMYKLLNDLYLNEESYTKMLYDDLGITEDVLNYVKYNGNKALSNLGFEPYFEEREFNPIIENALDTTTKNHDFFSVKGDGYVLALNVEALQDDDFVFDNK

SEQ ID NO: 587 - protein, 307 aa, Staphylococcus aureus
MINKDIYQALQQLIPNEKIKVDEPLKRYTYTKTGGNADFYITPTKNEEVQAVVKYAYQNEIPVTYLGNGSNIIIREGGIRGIVISLLSLDHIDVSDDAIIAGSGAAIIDVSRVARDYALTGLEFACGIPGSIGGAVYMNAGAYGGEVKDCIDYALCVNEQGSLIKLTTKELELDYRNSIIQKEHLVVLEAAFTLAPGKMTEIQAKMDDLTERRESKQPLEYPSCGSVFQRPPGHFAGKLIQDSNLQGHRIGGVEVSTKHAGFMVNVDNGTATDYENLIHYVQKTVKEKFGIELNREVRIIGEHPKES

SEQ ID NO: 588 - protein, 310 aa, Staphylococcus aureus
MLTTEKLVETLKLDLIAGEEGLSKPIKNADISRPGLEMAGYFSHYASDRIQLLGTTELSFYNLLPDKDRAGRMRKLCRPETPAIIVTRGLQPPEELVEAAKELNTPLIVAKDATTSLMSRLTTFLEHALAKTTSLHGVLVDVYGVGVLITGDSGIGKSETALELVKRGHRLVADDNVEIRQINKDELIGKPPKLIEHLLEIRGLGIINVMTLFGAGSILTEKRIRLNINLENWNKQKLYDRVGLNEETLSILDTEITKKTIPVRPGRNVAVIIEVAAMNYRLNIMGINTAEEFSERLNEEIIKNSHKSEE

SEQ ID NO: 589 - protein, 311 aa, Staphylococcus aureus
MTEIDFDIAIIGAGPAGMTAAVYASRANLKTVMIERGIPGGQMANTEEVENFPGFEMITGPDLSTKMFEHAKKFGAVYQYGDIKSVEDKGEYKVINFGNKELTAKAVIIATGAEYKKIGVPGEQELGGRGVSYCAVCDGAFFKNKRLFVIGGGDSAVEEGTFLTKFADKVTIVHRRDELRAQRILQDRAFKNDKIDFIWSHTLKSINEKDGKVGSVTLTSTKDGSEETHEADGVFIYIGMKPLTAPFKDLGITNDVGYIVTKDDMTTSVPGIFAAGDVRDKGLRQIVTATGDGSIAAQSAAEYIEHLNDQA

SEQ ID NO: 590 - protein, 336 aa, Staphylococcus aureus
MAVKVAINGFGRIGRLAFRRIQEVEGLEVVAVNDLTDDDMLAHLLKYDTMQGRFTGEVEVVDGGFRVNGKEVKSFSEPDASKLPWKDLNIDVVLECTGFYTDKDKAQAHIEAGAKKVLISAPATGDLKTIVFNTNHQELDGSETVVSGASCTTNSLAPVAKVLNDDFGLVEGLMTTIHAYTGDQNTQDAPHRKGDKRRARAAAENIIPNSTGAAKAIGKVIPEIDGKLDGGAQRVPVATGSLTELTVVLEKQDVTVEQVNEAMKNASNESFGYTEDEIVSSDVVGMTYGSLFDATQTRVMSVGDRQLVKVAAWYDNEMSYTAQLVRTLAYLAELSK

SEQ ID NO: 591 - protein, 396 aa, Staphylococcus aureus
MAKKIVSDLDLKGKTVLVRADFNVPLKDGEITNDNRIVQALPTIQYIIEQGGKIVLFSHLGKVKEESDKAKLTLRPVAEDLSKKLDKEVVFVPETRGEKLEAAIKDLKEGDVLLVENTRYEDLDGKKESKNDPELGKYWASLGDVFVNDAFGTAHREHASNVGISTHLETAAGFLMDKEIKFIGGVVNDPHKPVVAILGGAKVSDKINVIKNLVNIADKIIIGGGMAYTFLKAQGKEIGISLLEEDKIDFAKDLLEKHGDKIVLPVDTKVAKEFSNDAKITVVPSDSIPADQEGMDIGPNTVKLFADELEGAHTVVWNGPMGVFEFSNFAQGTIGVCKAIANLKDAITIIGGGDSAAAAISLGFENDFTHISTGGGASLEYLEGKELPGIKAINNK

SEQ ID NO: 592 - protein, 253 aa, Staphylococcus aureus
MRTPIIAGNWKMNKTVQEAKDFVNALPTLPDSKEVESVICAPAIQLDALTTAVKEGKAQGLEIGAQNTYFEDNGAFTGETSPVALADLGVKYVVIGHSERRELFHETDEEINKKAHAIFKHGMTPIICVGETDEERESGKANDVVGEQVKKAVAGLSEDQLKSVVIAYEPIWAIGTGKSSTSEDANEMCAFVRQTIADLSSKEVSEATRIQYGGSVKPNNIKEYMAQTDIDGALVGGASLKVEDFVQLLEGAK

SEQ ID NO: 593 - protein, 434 aa, Staphylococcus aureus [sequence omitted]

SEQ ID NO: 594 - protein, 355 aa, Staphylococcus aureus
MWNKNRLTQMLSIEYPIIQAGMAGSTTPKLVASVSNSGGLGTIGAGYFNTQQLEDEIDYVRQLTSNSFGVNVFVPSQQSYTSSQIENMNAWLKPYRRALHLEEPVVKIIEEQQFKCHIDTIIKKQVPVCCFTFGIQNESIIERLKEANIKLIGTATSVDEAIANEKAGMDAIVAQGSEAGGHRGSFLKPKNQLPMVGTISLVPQIVDVVSIPVIAAGGIMDGRGVLASIVLGAEGVQMGTAFLTSQDSNASELLRDAIINSKETDTVVTKAFSGKLARGINNRFIEEMSQYEGDIPDYPIQNELTSSIRKAAANIGDKELTHMWSGQSPRLATTHPANTIMSNIINQINQIMQYK

SEQ ID NO: 595 - protein, 191 aa, Staphylococcus aureus
MKKELLEWIISIAVAFVILFIVGKFIVTPYTIKGESMDPTLKDGERVAVNIIGYKTGGLEKGNVVVFHANKNDDYVKRVIGVPGDKVEYKNDTLYVNGKKQDEPYLNYNLKHKQGDYITGTFQVKDLPNANPKSNVIPKGKYLVLGDNREVSKDSRAFGLIDEDQIVGKVSFRFWPFSEFKHNFNPENTKN

SEQ ID NO: 596 - protein, 313 aa, Staphylococcus aureus
MNVGIKGFGAYAPEKIIDNAYFEQFLDTSDEWISKMTGIKERHWADDDQDTSDLAYEASVKAIADAGIQPEDIDMIIVATATGDMPFPTVANMLQERLGTGKVASMDQLAACSGFMYSMITAKQYVQSGDYHNILVVGADKLSKITDLTDRSTAVLFGDGAGAVIIGEVSEGRGIISYEMGSDGTGGKHLYLDKDTGKLKMNGREVFKFAVRIMGDASTRVVEKANLTSDDIDLFIPHQANIRIMESARERLGISKDKMSVSVNKYGNTSAASIPLSIDQELKNGKLKDDDTIVLVGFGGGLTWGAMTIKWGK

SEQ ID NO: 597 - protein, 414 aa, Staphylococcus aureus
MSQNKRVVITGMGALSPIGNDVKTTWENALKGVNGIDKITRIDTEPYSVHLAGELKNFNIEDHIDKKEARRMDRFTQYAIVAAREAVKDAQLDINDNTADRIGVWIGSGIGGMETFEIAHKQLMDKGPRRVSPFFVPMLIPDMATGQVSIDLGAKGPNGATVTACATGTNSIGEAFKIVQRGDADAMITGGTEAPITHMAIAGFSASRALSTNDDIETACRPFQEGRDGFVMGEGAGILVIESLESAQARGANIYAEIVGYGTTGDAYHITAPAPEGEGGSRAMQAAMDDAGIEPKDVQYLNAHGTSTPVGDLNEVKAIKNTFGEAAKHLKVSSTKSMTGHLLGATGGIEAIFSALSIKDSKVAPTIHAVTPDPECDLDIVPNEAQDLDITYAMSNSLGFGGHNAVLVFKKFEA

SEQ ID NO: 598 - protein, 313 aa, Staphylococcus aureus
MKNDEVLLSIKNLKQYFNAGKKNEVRAIENISFDIYKGETLGLVGESGCGKSTTGKSIIKLNDITSGEILYEGIDIQKIRKRKDLLKFNKKIQMIFQDPYASLNPRLKVMDIVAEGIDIHHLATDKRDRKKRVYDLLETVGLSKEHANRYPHEFSGGQRQRIGIARALAVEPEFIIADEPISALDVSIQAQVVNLLLKLQRERGITFLFIAHDLSMVKYISDRIAVMHFGKIVEIGPAEEIYQNPLHDYTKSLLSAIPQPDPESERSRKRFSYIDDEANNHLRQLHEIRPNHFVFSTEEEAAQLRENKLVTQN

SEQ ID NO: 599 - protein, 269 aa, Staphylococcus aureus
MRYTILTKGDSKSNALKHKMMNYMKDFRMIEDSENPEIVISVGGDGTLLQAFHQYSHMLSKVAFVGVHTGHLGFYADWLPHEVEKLIIEINNSEFQVIEYPLLEIIMRYNDNGYETRYLALNEATMKTENGSTLVVDVNLRGKHFERFRGDGLCVSTPSGSTAYNKALGGALIHPSLEAMQITEIASINNRVFRTVGSPLVLPKHHTCLISPVNHDTIRMTIDHVSIKHKNVNSIQYRVANEKVRFARFRPFPFWKRVHDSFISSDEER

SEQ ID NO: 600 - protein, 256 aa, Staphylococcus aureus
MLNLENKTYVIMGIANKRSIAFGVAKVLDQLGAKLVFTYRKERSRKELEKLLEQLNQPEAHLYQIDVQSDEEVINGFEQIGKDVGNIDGVYHSIAFANMEDLRGRFSETSREGFLLAQDISSYSLTIVAHEAKKLMPEGGSIVATTYLGGEFAVQNYNVMGVAKASLEANVKYLALDLGPDNIRVNAISAGPIRTLSAKGVGGFNTILKEIEERAPLKRNVDQVEVGKTAAYLLSDLSSGVTGENIHVDSGFHAIK

SEQ ID NO: 601 - protein, 494 aa, Staphylococcus aureus
MDASTLFKKVKVKRVLGSLEQQIDDITTDSRTAREGSIFVASVGYTVDSHKFCQNVADQGCKLVVVNKEQSLPANVTQVVVPDTLRVASILAHTLYDYPSHQLVTFGVTGTNGKTSIATMIHLIQRKLQKNSAYLGTNGFQINETKTKGANTTPETVSLTKKIKEAVDAGAESMTLEVSSHGLVLGRLRGVEFDVAIFSNLTQDHLDFHGTMEAYGHAKSLLFSQLGEDLSKEKYVVLNNDDSFSEYLRTVTPYEVFSYGIDEEAQFMAKNIQESLQGVSFDFVTPFGTYPVKSPYVGKFNISNIMAAMIAVWSKGTSLETIIKAVENLEPVEGRLEVLDPSLPIDLIIDYAHTADGMNKLIDAVQPFVKQKLIFLVGMAGERDLTKTPEMGRVACRADYVIFTPDNPANDDPKMLTAELAKGATHQNYIEFDDRAEGIKHAIDIAEPGDTVVLASKGREPYQIMPGHIKVPHRDDLIGLEAAYKKFGGGPVDQ

SEQ ID NO: 602 - protein, 390 aa, Staphylococcus aureus
MKIATLNKGKETKYFNGYPLIEEEDIYSQDHLKEGDIFQIVTDKSQYVATAYVGRQHKGLGWVLTYDKAQEINTAFFVKLFNTALAERDYYFNIDGTNAFRLFNAEGDGVGGLTIDNYDGHLLIQWYSKGIYKFKYAILEAVRKVFDYKSIYEKVRFKDSEYSGGFVEGDAPEFPIVIEENFTFYNVDLEDGLMTGIFLDQKEVRKKLRGQYAKERHVLNLFSYTGAFSVIAASEASSTTSVDLANRSRSLTEENFGLNAIDPKSQYIYVMDTFDFYKYAARHGHSYDTIVIDPPSFARNKKRTFSVQKDYDKLINGALNILSSEGTLLLCTNASVYPLKQFKNTIKKTLEESGVDYELTEVMGLPKDFKTHPHYKPSKYLKAVFVNIRH

SEQ ID NO: 603 - protein, 88 aa, Staphylococcus aureus
MEQNSYVIIDETGIHARPATMLVQTASKFDSDIQLEYNGKKVNLKSIMGVMSLGVGKDAEITIYADGSDESDAIQAISDVLSKEGLTK

SEQ ID NO: 604 - protein, 572 aa, Staphylococcus aureus
MSKLIKGIAASDGVAIAKAYLLVEPDLTFDKNEKVTDVEGEVAKFNSAIEASKVELTKIRNNAEVQLGADKAAIFDAHLLVLDDPELIQPIQDKIKNENANAATALTDVTTQFVTIFESMDNEYMKERAADIRDVSKRVLSHILGVELPNPSMIDESVVIVGNDLTPSDTAQLNKEFVQGFATNIGGRTSHSAIMSRSLEIPAIVGTKSITQEVKQGDIIIVDGLNGDVIVNPTEDELIAYQDKRECYFADKKELQKLRDADTVTVDGVHAELAANIGTPNDLPGVIENGAQGIGLYRTEFLYMGRDQMPTEEEQFEAYKEVLEAMDGKRVVVRTLDIGGDKELSYLNLPEEMNPFLGYRAIRLCLAQQDIFRPQLRALLRASVYGKLNIMFPMVATINEFREAKAILLEEKENLKNEGHDISDDIELGIMVEIPATAALADVFAKEVDFFSIGTNDLIQYTLAADRMSERVSYLYQPYNPSILRLVKQVIEASHKEGKWTGMCGEMAGDETAIPLLLGLGLDEFSMSATSILKARRQINGLSKNEMTELANRAVDCATQEEVIELVNNYVK

SEQ ID NO: 605 - protein, 565 aa, Staphylococcus aureus
MKQLHPNEVGVYALGGLGEIGKNTYAVEYKDEIVIIDAGIKFPDDNLLGIDYVIPDYTYLVQNQDKIVGLFITHGHEDHIGGVPFLLKQLNIPIYGGPLALGLIRNKLEEHHLLRTAKLNEINEDSVIKSKHFTISFYLTTHSIPETYGVIVDTPEGKVVHTGDFKFDFTPVGKPANIAKMAQLGEEGVLCLLSDSTNSLVPDFTLSEREVGQNVDKIFRNCKGRIIFATFASNIYRVQQAVEAAIKNNRKIVTFGRSMENNIKIGMELGYIKAPPETFIEPNKINTVPKHELLILCTGSQGEPMAALSRIANGTHKQIKIIPEDTVVFSSSPIPGNTKSINRTINSLYKAGADVIHSKISNIHTSGHGSQGDQQLMLRLIKPKYFLPIHGEYRMLKAHGETGVECGVEEDNVFIFDIGDVLALTHDSARKAGRIPSGNVLVDGSGIGDIGNVVIRDRKLLSEEGLVIVVVSIDFNTNKLLSGPDIISRGFVYMRESGQLIYDAQRKIKTDVISKLNQNKDIQWHQIKSSIIETLQPYLFEKTARKPMILPVIMKVNEQKESNNK

SEQ ID NO: 606 - protein, 180 aa, Staphylococcus aureus
MRVIAGKHKSKALESMEGRNTRPTMDKVKEGIFNSLYDVSGIGLDLFAGSGALGIEALSRGMDKVIFVDQNFKAVKVIKSNLANLDLEAQSEVYKNNADRALKALSKRDIQFDVIFLDPPYNKGLIDKALKLISEFNLLKENGIIVCEFSNHEEIDYQPFNMIKRYHYGLTDTLLLEKGE

SEQ ID NO: 607 - protein, 160 aa, Staphylococcus aureus
MEHTIAVIPGSFDPITYGHLDIIERSTDRFDEIHVCVLKNSKKEGTFSLEERMDLIEQSVKHLPNVKVHQFSGLLVDYCEQVGAKTIIRGLRAVSDFEYELRLTSMNKKLNNEIETLYMMSSTNYSFISSSIVKEVAAYRADISEFVPPYVEKALKKKFK

SEQ ID NO: 608 - protein, 352 aa, Staphylococcus aureus
MSEQQTMSELKQQALVDINEANDERALQEVKVKYLGKKGSVSGLMKLMKDLPNEEKPAFGQKVNELRQTIQNELDERQQMLVKEKLNKQLAEETIDVSLPGRHIEIGSKHPLTRTIEEIEDLFLGLGYEIVNGYEVEQDHYNFEMLNLPKSHPARDMQDSFYITDEILLRTHTSPVQARTMESRHGQGPVKIICPGKVYRRDSDDATHSHQFTQIEGLVVDKNVKMSDLKGTLELLAKKLFGADREIRLRPSYFPFTEPSVEVDVSCFKCKGKGCNVCKHTGWIEILGAGMVHPNVLEMAGFDSSEYSGFAFGMGPDRIAMLKYGIEDIRHFYTNDVRFLDQFKAVEDRGDM

SEQ ID NO: 609 - protein, 800 aa, Staphylococcus aureus
MLISNEWLKEYVTIDDSVSDLAERITRTGIEVDDLIDYTKDIKNLVVGFVKSKEKHPDADKLNVCQVDIGEDEPVQIVCGAPNVDAGQYVIVAKVGGRLPGGIKIKRAKLRGERSEGMICSLQEIGISSNYIPKSFESGIYVFSESQVPGTDALQALYLDDQVMEFDLTPNRADALSMIGTAYEVAALYNTKMTKPETTSNELELSANDELTVTIENEDKVPYYSARVVHDVTIEPSPIWMQARLIKAGIRPINNVVDISNYVLLEYGQPLHMFDQDAIGSQQIVVRQANEGEKMTTLDDTERELLTSDIVITNGQTPIALAGVMGGDFSEVKEQTSNIVIEGAIFDPVSIRHTSRRLNLRSESSSRFEKGIATEFVDEAVDRACYLLQTYANGKVLKDRVSSGELGAFITPIDITADKINRTIGFDLSQNDIVTIFNQLGFDTEINDDVITVLVPSRRKDITIKEDLIEEVARIYGYDDIPSTLPVFDKVTSGQLTDRQYKTRMVKEVLEGAGLDQAITYSLVSKEDATAFSMQQRQTIDLLMPMSEAHASLRQSLLPHLIEAASYNVARKNKDVKLFEIGNVFFANGEGELPDQVEYLSGILTGDYVVNQWQGKKETVDFYLAKGVVDRVSEKLNLEFSYRRADIDGLHPGRTAEILLENKVVGFIGELHPTLAADNDLKRTYVFELNFDALMAVSVGYINYQPIPRFPGMSRDIALEVDQNIPAADLLSTIHAHGGNILKDTLVFDVYQGEHLEKGKKSIAIRLNYLDTEETLTDERVSKVQAEIEAALIEQGAVIR

SEQ ID NO: 610 - protein, 266 aa, Staphylococcus aureus
MNKPIGVIDSGVGGLTVAKEIMRQLPNETIYYLGDIGRCPYGPRPGEQVKQYTVEIARKLMEFDIKMLVIACNTATAVALEYLQKTLSIPVIGVIEPGARTAIMTTRNQNVLVLGTEGTIKSEAYRTHIKRINPHVEVHGVACPGFVPLVEQMRYSDPTITSIVIHQTLKRWRNSESDTVILGCTHYPLLYKPIYDYFGGKKTVISSGLETAREVSALLTFSNEHASYTEHPDHRFFATGDPTHITNIIKEWLNLSVNVERISVND

SEQ ID NO: 611 - protein, 195 aa, Staphylococcus aureus
MKEIVIASNNQGKINDFKVIFPDYHVIGISELIPDFDVEETGSTFEENAILKSEAAAKALNKTVIADDSGLEVFALNGEPGIYSARYAGENKSDEANIEKLLNKLGNTTDRRAQFVCVISMSGPDMETKVFKGTVSGEIADGKYGENGFGYDPIFYVPKLDKTMAQLSKEQKGQISHRRNAINLLQAFLEGEKNV

SEQ ID NO: 612 - protein, 310 aa, Staphylococcus aureus
MAKIVVALGGNALGKSPQEQLELVKNTAKSLVGLITKGHEIVISHGNGPQVGSINLGLNYAAEHNQGPAFPFAECGAMSQAYIGYQLQESLQNELHSIGMDKQVVTLVTQVEVDENDPAFNNPSKPIGLFYNKEEAEQIQKEKGFIFVEDAGRGYRRVVPSPQPISIIELESIKTLIKNDTLVIAAGGGGIPVIREQHDGFKGIDAVIDKDKTSALLGANIQCDQLIILTAIDYVYINFNTENQQPLKTTNVDELKRYIDENQFAKGSMLPKIEAAISFIENNPKGSVLITSLNELDAALEGKVGTVIKK

SEQ ID NO: 613 - protein, 311 aa, Staphylococcus aureus
MFHHISVMLNETIDYLNVKENGVYIDCTLGGAGHALYLLNQLNDDGRLIAIDQDQTAIDNAKEVLKDHLHKVTFVHSNFRELTQILKDLNIEKVDGIYYDLGVSSPQLDIPERGFSYHHDATLDMRMDQTQELTAYEIVNNWSYEALVKIFYRYGEEKFSKQIARRIEAHREQQPITTTLELVDIIKEGIPAKARRKGGHPAKRVFQALRIAVNDELSAFEDSIEQAIELVKVDGRISVITFHSLEDRLCKQVFQEYEKGPEVPRGLPVIPEAYTPKLKRVNRKPITATEEDLDDNNRARSAKLRVAEILK

SEQ ID NO: 614 - protein, 133 aa, Staphylococcus aureus
MAVEKVYQPYDEQVYNSIPKQQPQTKPEKKTVSRKVVVQLTKFEKVLYITLITVIAMLSIYMLSLKMDAYDTRGKIADLDYKIDKQSSENSALQSEIKKNSSYERIYEKAKKQGMSLENDNVKVVRSNGEAKN

SEQ ID NO: 615 - protein, 744 aa, Staphylococcus aureus
MAKQKIKIKKNKIGAVLLVGLFGLLFFILVLRISYIMITGHSNGQDLVMKANEKYLVKNAQQPERGKIYDRNGKVLAEDVERYKLVAVIDKKASANSKKPRHVVDKKETAKKLSTVIDMKPEEIEKRLSQKKAFQIEFGRKGTNLTYQDKLKIEKMNLPGISLLPETERFYPNGNFASHLIGRAQKNPDTGELKGALGVEKIFDSYLSGSKGSLRYIHDIWGYIAPNTKKEKQPKRGDDVHLTIDSNIQVFVEEALDGMVERYQPKDLFAVVMDAKTGEILAYSQRPTFNPETGKDFGKKWANDLYQNTYEPGSTFKSYGLAAAIQEGAFDPDKKYKSGHRDIMGSRISDWNRVGWGEIPMSLGFTYSSNTLMMHLQDLVGADKMKSWYERFGFGKSTKGMFDGEAPGQIGWSNELQQKTSSFGQSTTVTPVQMLQAQSAFFNDGNMLKPWFVNSVENPVSKRQFYKGQKQIAGKPITKDTAEKVEKQLDLVVNSKKSHAANYRIDGYEVEGKTGTAQVAAPNGGGYVKGPNPYFVSFMGDAPKKNPKVIVYAGMSLAQKNDQEAYELGVSKAFKPIMENTLKYLNVGKSKDDTSNAEYSKVPDVEGQDKQKAIDNVSAKSLEPVTIGSGTQIKAQSIKAGNKVLPHSKVLLLTDGDLTMPDMSGWTKEDVIAFENLTNIKVNLKGSGFVSHQSISKGQKLTEKDKIDVEFSSENVDSNSTNNSDSNSDDKKKSDSKTDKDKSD

SEQ ID NO: 616 - protein, 321 aa, Staphylococcus aureus
MIFVYALLALVITFVLVPVLIPTLKRMKFGQSIREEGPQSHMKKTGTPTMGGLTFLLSIVITSLVAIIFVDQANPIILLLFVTIGFGLIGFIDDYIIVVKKNNQGLTSKQKFLAQIGIAIIFFVLSNVFHLVNFSTSIHIPFTNVAIPLSFAYVIFIVFWQVGFSNAVNLTDGLDGLATGLSIIGFTMYAIMSFVLGETAIGIFCIIMLFALLGFLPYNINPAKVFMGDTGSLALGGIFATISIMLNQELSLIFIGLVFVIETLSVMLQVASFKLTGKRIFKMSPIHHHFELIGWSEWKVVTVFWAVGLISGLIGLWIGVH

SEQ ID NO: 617 - protein, 449 aa, Staphylococcus aureus
MLNYTGLENKNVLVVGLAKSGYEAAKLLSKLGANVTVNDGKDLSQDAHAKDLESMGISVVSGSHPLTLLDNNPIIVKNPGIPYTVSIIDEAVKRGLKILTEVELSYLISEAPIIAVTGTNGKTTVTSLIGDMFKKSRLTGRLSGNIGYVASKVAQEVKPTDYLVTELSSFQLLGIEKYKPHIAIITNIYSAHLDYHENLENYQNAKKQIYKNQTEEDYLICNYHQRQVIESEELKAKTLYFSTQQEVDGIYIKDGFIVYKGVRIINTEDLVLPGEHNLENILAAVLACILAGVPIKAIIDSLTTFSGIEHRLQYVGTNRTNKYYNDSKATNTLATQFALNSFNQPIIWLCGGLDRGNEFDELIPYMENVRAMVVFGQTKAKFAKLGNSQGKSVIEANNVEDAVDKVQDIIEPNDVVLLSPACASWDQYSTFEERGEKFIERFRAHLPSY

SEQ ID NO: 618 - protein, 470 aa, Staphylococcus aureus
MEEHYYVSIDIGSSSVKTIVGEKFHNGINVIGTGQTYTSGIKNGLIDDFDIARQAIKDTIKKASIASGVDIKEVFLKLPIIGTEVYDESNEIDFYEDTEINGSHIEKVLEGIREKNDVQETEVINVFPIRFIVDKENEVSDPKELIARHSLKVEAGVIAIQKSILINMIKCVEACGVDVLDVYSDAYNYGSILTATEKELGACVIDIGEDVTQVAFYERGELVDADSIEMAGRDITDDIAQGLNTSYETAEKVKHQYGHAFYDSASDQDIFTVEQVDSDETVQYTQKDLSDFIEARVEEIFFEVFDVLQDLGLTKVNGGFIVTGGSANLLGVKELLSDMVSEKVRIHTPSQMGIRKPEFSSAISTISSSIAFDELLDYVTINYHDNEETEEDVIDVKDKDNESKLGGFDWFKRKTNKKDTHENEVESTDEEIYQSEDNHQEHKQNHEHVQDKDKDKEESKFKKLMKSLFE

SEQ ID NO: 619 - protein, 390 aa, Staphylococcus aureus
MLEFEQGFNHLATLKVIGVGGGGNNAVNRMIDHGMNNVEFIAINTDGQALNLSKAESKIQIGEKLTRGLGAGANPEIGKKAAEESREQIEDAIQGADMVFVTSGMGGGTGTGAAPVVAKIAKEMGALTVGVVTRPFSFEGRKRQTQAAAGVEAMKAAVDTLIVIPNDRLLDIVDKSTPMMEAFKEADNVLRQGVQGISDLIAVSGEVNLDFADVKTIMSNQGSALMGIGVSSGENRAVEAAKKAISSPLLETSIVGAQGVLMNITGGESLSLFEAQEAADIVQDAADEDVNMIFGTVINPELQDEIVVTVIATGFDDKPTSHGRKSGSTGFGTSVNTSSNATSKDESFTSNSSNAQATDSVSERTHTTKEDDIPSFIRNREERRSRRTRR

SEQ ID NO: 620 - protein, 207 aa, Staphylococcus aureus [sequence omitted]

SEQ ID NO: 621 - protein, 311 aa, Staphylococcus aureus
MTKIIFMGTPDFSTTVLEMLIAEHDVIAVVTQPDRPVGRKRVMTPPPVKKVAMKYDLPVYQPEKLSGSEELEQLLQLDVDLIVTAAFGQLLPESLLALPKLGAINVHASLLPKYRGGAPIHQAIIDGEQETGITIMYMVKKLDAGNIISQQAIKIEENDNVGTMHDKLSVLGADLLKETLPSIIEGTNESVPQDDTQATFASNIRREDERISWNKPGRQVFNQIRGLSPWPVAYTTMDDTNLKIYDAELVETNKINEPGTIIETTKKAIIVATNDNEAVAIKDMQLAGKKRMLAANYLSGAQNTLVGKKLI

SEQ ID NO: 622 - protein, 247 aa, Staphylococcus aureus
MLEAQFFTDTGQHRDKNEDAGGIFYNQTNQQLLVLCDGMGGHKAGEVASKFVTDELKSRFEAENLIEEHQAENWLRNNIKDINFQLYHYAQENAEYKGMGTTCVCALVFEKSVVIANVGDSRAYVINSRQIEQITSDHSFVNHLVLTGQITPEEAFTHPQRNIITKVMGTDKRVSPDLFIKRLNFYDYLLLNSDGLTDYVKDNEIKRLLVKEGTIEDHGDQLMQLALDNHSKDNVTFILAAIEGDKV

SEQ ID NO: 623 - protein, 213 aa, Staphylococcus aureus
MHINLLCSNRHLPQDIWAKSNEGKWGGVDRGALILLKHQIIPFFSVGDFDSVSKEERQLLTEQLQIKPVQAEKADTDLALAVDKAVALGFDSITIYGATGGRLDHFFGAIQLLLKKAYYKHDVHIEVIDQQNKIELLPKGQHTVEKDKSYPYISFIPMTDDVELSLAGFKYNLARQMLNIGSTLTISNEIESLQAKVTVHDGLILQIRSTDLN

SEQ ID NO: 624 - protein, 308 aa, Staphylococcus aureus
MSKTAIIFPGQGAQKVGMAQDLFNNNDQATEILTSAAKTLDFDILETMFTDEEGKLGETENTQPALLTHSSALLAALKNLNPDFTMGHSLGEYSSLVAADVLSFEDAVKIVRKRGQLMAQAFPTGVGSMAAVLGLDFDKVDEICKSLSSDDKIIEPANINCPGQIVVSGHKALIDELVEKGKSLGAKRVMPLAVSGPFHSSLMKVIEEDFSSYINQFEWRDAKFPVVQNVNAQGETDKEVIKSNMVKQLYSPVQFINSTEWLIDQGVDHFIEIGPGKVLSGLIKKINRDVKLTSIQTLEDVKGWNEND

SEQ ID NO: 625 - protein, 246 aa, Staphylococcus aureus
MKMTKSALVTGASRGIGRSIALQLAEEGYNVAVNYAGSKEKAEAVVEEIKAKGVDSFAIQANVADADEVKAMIKEVVSQFGSLDVLVNNAGITRDNLLMRMKEQEWDDVIDTNLKGVFNCIQKATPQMLRQRSGAIINLSSVVGAVGNPGQANYVATKAGVIGLTKSAARELASRGITVNAVAPGFIVSDMTDALSDELKEQMLTQIPLARFGQDTDIANTVAFLASDKAKYITGQTIHVNGGMYM

SEQ ID NO: 626 - protein, 77 aa, Staphylococcus aureus
MENFDKVKDIIVDRLGVDADKVTEDASFKDDLGADSLDIAELVMELEDEFGTEIPDEEAEKINTVGDAVKFINSLEK

SEQ ID NO: 627 - protein, 243 aa, Staphylococcus aureus
MSKQKKSEIVNRFRKRFDTKMTELGFTYQNIDLYQQAFSHSSFINDFNMNRLDHNERLEFLGDAVLELTVSRYLFDKHPNLPEGNLTKMRATIVCEPSLVIFANKIGLNEMILLGKGEEKTGGRTRPSLISDAFEAFIGALYLDQGLDIVWKFAEKVIFPHVEQNELLGVVDFKTQFQEYVHQQNKGDVTYNLIKEEGPAHHRLFTSEVILQGEAIAEGKGKTKKESEQRAAKSAYKQLKQIK

SEQ ID NO: 628 - protein, 1188 aa, Staphylococcus aureus
MVYLKSIDAIGFKSFADQTNVQFDKGVTAIVGPNGSGKSNITDAIKWVLGEQSAKSLRGSKMEDIIFSGAEHRKAQNYAEVQLRLDNHSKKLSVDENEVIVTRRLYRSGESEYYINNDRARLKDIADLFLDSGLGKEAYSIISQGRVDEILNAKPIDRRQIIEESAGVLKYKKRKAESLNKLDQTEDNLTRVEDILYDLEGRVEPLKEEAAIAKEYKTLSHQMKHSDIVVTVHDIDQYTNDNRQLDQRLNDLQGQQANKEADKQRLSQQIQQYKGKRHQLDNDVESLNYQLVKATEAFEKYTGQLNVLEERKKNQSETNARYEEEQENLMELLENISNEISEAQDTYKSLKSKQKELNAVIRELEEQLYVSDEAHDEKLEEIKNEYYTLMSEQSDVNNDIRFLKHTIEENEAKKSRLDSRLVEVFEQLKDIQGQIKTTKKEYQQTNKELSAVDKEIKNIEKDLTDTKKAQNEYEEKLYQAYRYTEKMKTRIDSLATQEEEYTYFFNGVKHILKAKNKELKGIHGAVAEIIDVPSKLTQAIETALGASLQHVIVDSEKDGRQAIQFLKERNLGRATFLPLNVIQSRVVATDIKSIAKEANGFISIASEAVKVAPEYQNIIGNLLGNTIIVDHLKHANELARAIKYRTRIVTLEGDIVNPGGSMTGGGARKSKSILSQKDELTTMRHQLEDYLRQTESFEQQFKELKIKSDQLSELYFEKSQKHNTLKEQVHHFEMELDRLTTQETQIKNDHEEFEFEKNDGYTSDKSRQTLSEKETHLESIKASLKRLEDEIERYTKLSKEGKESVTKTQQTLHQKQSDLAVVKERIKTQQQTIDRLNNQSQQTKHQLKDVKEKIAFFNSDEVMGEQAFQNIKDQINGQQETRTRLSDELDKLKQQRIELNEQIDAQEATLQVCHQDILAIENHYQDIKAEQSKLDVLIHHAIDHLNDEYQLTVERAKSEYTSDESIDALRKKVKLMKMSIDELGPVNLNAIEQFEELNERYTFLSEQRTDLRKAKETLEQIISEMDQEVTERFKETFHAIQGHFTAVFKQLFGGGDAELQLTEADYLTAGIDIVVQPPGKKLQHLSLLSGGERALTAIALLFAILKVRSAPFVILDEVEAALDEANVIRYAKYLNELSDETQFIVITHRKGTMEFADRLYGVTMQESGVTKLVSVNLNTIDDVLKEEQ

SEQ ID NO: 629 - protein, 416 aa, Staphylococcus aureus
MSFFKRLKDKFATNKENEEVKSLREEQGQDKLEDTHSEGSTQDVNDLAENAEVKKKPRKLSEADFDDDGLISIEDFEEIEAQKMGAKFKAGLEKSRQNFQEQLNNLIARYRKVDEDFFEALEEMLITADVGFNTVMTLTEELRMEAQRRNIQDTEDLREVIVEKIVEIYHQEDDNSEAMNIEDGRLNVILMVGVNGVGKTTTIGKLAYRYKMEGKKVMLAAGDTFRAGAIDQLKVWGERVGVDVISQSEGSDPAAVMYDAINAAKNKGVDILICDTAGRLQNKTNLMQELEKVKRVINRAVPDAPHEALLCLDATTGQNALSQARNFKEVTNVTGIVLTKLDGTAKGGIVLAIRNELHIPVKYVGLGEQLDDLQPFNPESYVYGLFADMIEQNDEITTVENDQIVTEEKDDNHGAK

SEQ ID NO: 630 - protein, 91 aa, Staphylococcus aureus
MAVKIRLTRLGSKRNPFYRIVVADARSPRDGRIIEQIGTYNPTSANAPEIKVDEALALKWLNDGAKPTDTVHNILSKEGIMKKFDEQKKAK

SEQ ID NO: 631 - protein, 245 aa, Staphylococcus aureus
MKIDYLTLFPEMFDGVLNHSIMKRAQENNKLQINTVNFRDYAINKHNQVDDYPYGGGQGMVLKPEPVFNAMEDLDVTEQTRVILMCPQGEPFSHQKAVELSKADHIVFICGHYEGYDERIRTHLVTDEISMGDYVLTGGELPAMTMTDAIVRLIPGVLGNEQSHQDDSFSDGLLEFPQYTRPREFKGLTVPDVLLSGNHANIDAWRHEQKLIRTYNKRPDLIEKYPLTNEDKQILERYKIGLKKG

SEQ ID NO: 632 - protein, 116 aa, Staphylococcus aureus
MTNHKLIEAVTKSQLRTDLPSFRPGDTLRVHVRIIEGTRERIQVFEGIVIKRRGGGVSETFTVRKISSGVGVERTFPLHTPKIEKIEVKRRGKVRRAKLYYLRSLRGKAARIQEIR

SEQ ID NO: 633 - protein, 294 aa, Staphylococcus aureus
MVIQWYPGHMAKAKREVSEQLKKVDVVFELVDARIPYSSRNPMIDEVINQKPRVVILNKKDMSNLNEMSKWEQFFIDKGYYPVSVDAKHGKNLKKVEAAAIKATAEKFEREKAKGLKPRAIRAMIVGIPNVGKSTLINKLAKRSIAQTGNKPGVTKQQQWIKVSNALQLLDTPGILWPKFEDEEVGKKLSLTGAIKDSIVHLDEVAIYGLNFLIQNDLARLKSHYNIEVPEDAEIIAWFDAIGKKRGLIRRGNEIDYEAVIELIIYDIRNAKIGNYCFDIFKDMTEELANDANN

SEQ ID NO: 634 - protein, 298 aa, Staphylococcus aureus
MNHIQEAFLNTLKVERNFSEHTLKSYQDDLIQFNQFLEQEHLQLKTFEYRDARNYLSYLYSNHLKRTSVSRKISTLRTFYEYWMTLDENIINPFVQLVHPKKEKYLPQFFYEEEMEALFKTVEEDTSKNLRDRVILELLYATGIRVSELVNIKKQDIDFYANGVTVLGKGSKERFVPFGAYCRQSIENYLEHFKPIQSCNHDFLILNMKGEAITERGVRYVLNDIVKRTAGVSEIHPHKLRHTFATHLLNQGADLRTVQSLLGHVNLSTTGKYTHVSNQQLRKVYLNAHPRAKKENET

SEQ ID NO: 635 - protein, 255 aa, Staphylococcus aureus
MAVISMKQLLEAGVHFGHQTRRWNPKMKKYIFTERNGIYIIDLQKTVKKVDEAYNFLKQVSEDGGQVLFVGTKKQAQESVKSEAERAGQFYINQRWLGGLLTNYKTISKRIKRISEIEKMEEDGLFEVLPKKEVVELKKEYDRLIKFLGGIRDMKSMPQALFVVDPRKERNAIAEARKLNIPIVGIVDTNCDPDEIDYVIPANDDAIRAVKLLTAKMADAILEGQQGVSNEEVAAEQNIDLDEKEKSEETEATEE

SEQ ID NO: 636 - protein, 293 aa, Staphylococcus aureus
MATISAKLVKELRKKTGAGMMDCKKALTETDGDIDKAIDYLREKGIAKAAKKADRIAAEGLVHVETKGNDAVIVEINSETDFVARNEGFQELVKEIANQVLDTKAETVEALMETTLPNGKSVDERIKEAISTIGEKLSVRRFAIRTKTDNDAFGAYLHMGGRIGVLTVVEGSTDEEAARDVAMHIAAINPKYVSSEQVSEEEINHEREVLKQQALNEGKPENIVEKMVEGRLRKYLQEICAVDQDFVKNPDVTVEAFLKTKGGKLVDFVRYEVGEGMEKREENFADEVKGQMK

SEQ ID NO: 637 - protein, 240 aa, Staphylococcus aureus
MAQISKYKRVVLKLSGEALAGEKGFGINPVIIKSVAEQVAEVAKMDCEIAVIVGGGNIWRGKTGSDLGMDRGTADYMGMLATVMNALALQDSLEQLDCDTRVLTSIEMKQVAEPYIRRRAIRHLEKKRVVIFAAGIGNPYFSTDTTAALRAAEVEADVILMGKNNVDGVYSADPKVNKDAVKYEHLTHIQMLQEGLQVMDSTASSFCMDNNIPLTVFSIMEEGNIKRAVMGEKIGTLITK

SEQ ID NO: 638 - protein, 184 aa, Staphylococcus aureus
MSDIINETKSRMQKSIESLSRELANISAGRANSNLLNGVTVDYYGAPTPVQQLASINVPEARLLVISPYDKTSVADIEKAIIAANLGVNPTSDGEVIRIAVPALTEERRKERVKDVKKIGEEAKVSVRNIRRDMNDQLKKDEKNGDITEDELRSGTEDVQKATDNSIKEIDQMIADKEKDIMSV

SEQ ID NO: 639 - protein, 256 aa, Staphylococcus aureus
MFKKLINKKNTINNYNEELDSSNIPEHIAIIMDGNGRWAKKRKMPRIKGHYEGMQTIKKITRIASDIGVKYLTLYAFSTENWSRPESEVNYIMNLPVNFLKTFLPELIEKNVKVETIGFTDKLPKSTIEAINNAKEKTANNTGLKLIFAINYGGRAELVHSIKNMFDELHQQGLNSDIIDETYINNHLMTKDYPDPELLIRTSGEQRISNFLIWQVSYSEFIFNQKLWPDFDEDELIKCIKIYQSRQRRFGGLSEE

SEQ ID NO: 640 - protein, 567 aa, Staphylococcus aureus
MKQSKVFIPTMRDVPSEAEAQSHRLLLKSGLIKQSTSGIYSYLPLATRVLNNITAIVRQEMERIDSVEILMPALQQAELWEESGRWGAYGPELMRLQDRHGRQFALGPTHEELVTSIVRNELKSYKQLPMTLFQIQSKFRDEKRPRFGLLRGREFIMKDAYSFHADEASLDQTYQDMYQAYSRIFERVGINARPVVADSGAIGGSHTHEFMALSAIGEDTIVYSKESDYAANIEKAEVVYEPNHKHSTVQPLEKIETPNVKTAQELADFLGRPVDEIVKTMIFKVDGEYIMVLVRGHHEINDIKLKSYFGTDNIELATQDEIVNLVGANPGSLGPVIDKEIKIYADNFVQDLNNLVVGANEDGYHLINVNVGRDFNVDEYGDFRFILEGEKLSDGSGVAHFAEGIEVGQVFKLGTKYSESMNATFLDNQGKAQPLIMGCYGIGISRTLSAIVEQNHDDNGIVWPKSVTPFDLHLISINPKKDDQRELADALYAEFNTKFDVLYDDRQERAGVKFNDADLIGLPLRIVVGKRASEGIVEVKERLTGDSEEVHIDDLMTVITNKYDNLK

SEQ ID NO: 641 - protein, 1438 aa, Staphylococcus aureus
MAMTEQQKFKVLADQIKISNQLDAEILNSGELTRIDVSNKNRTWEFHITLPQFLAHEDYLLFINAIEQEFKDIANVTCRFTVTNGTNQDEHAIKYFGHCIDQTALSPKVKGQLKQKKLIMSGKVLKVMVSNDIERNHFDKACNGSLIKAFRNCGFDIDKIIFETNDNDQEQNLASLEAHIQEEDEQSARLATEKLEKMKAEKAKQQDNNESAVDKCQIGKPIQIENIKPIESIIEEEFKVAIEGVIFDINLKELKSGRHIVEIKVTDYTDSLVLKMFTRKNKDDLEHFKALSVGKWVRAQGRIEEDTFIRDLVMMMSDIEEIKKATKKDKAEEKRVEFHLHTAMSQMDGIPNIGAYVKQAADWGHPAIAVTDHNVVQAFPDAHAAAEKHGIKMIYGMEGMLVDDGVPIAYKPQDVVLKDATYVVFDVETTGLSNQYDKIIELAAVKVHNGEIIDKFERFSNPHERLSETIINLTHITDDMLVDAPEIEEVLTEFKEWVGDAIFVAHNASFDMGFIDTGYERLGFGPSTNGVIDTLELSRTINTEYGKHGLNFLAKKYGVELTQHHRAIYDTEATAYIFIKMVQQMKELGVLNHNEINKKLSNEDAYKRARPSHVTLIVQNQQGLKNLFKIVSASLVKYFYRTPRIPRSLLDEYREGLLVGTACDEGELFTAVMQKDQSQVEKIAKYYDFIEIQPPALYQDLIDRELIRDTETLHEIYQRLIHAGDTAGIPVIATGNAHYLFEHDGIARKILIASQPGNPLNRSTLPEAHFRTTDEMLNEFHFLGEEKAHEIVVKNTNELADRIERVVPIKDELYTPRMEGANEEIRELSYTNARKLYGEDLPQIVIDRLEKELKSIIGNGFAVIYLISQRLVKKSLDDGYLVGSRGSVGSSFVATMTEITEVNPLPPHYICPNCKTSEFFNDGSVGSGFDLPDKTCETCGAPLIKEGQDIPFETFLGFKGDKVPDIDLNFSGEYQPNAHNYTKVLFGEDKVFRAGTIGTVAEKTAFGYVKGYLNDQGIHKRGAEIDRLVKGCTGVKRTTGQHPGGIIVVPDYMDIYDFTPIQYPADDQNSAWMTTHFDFHSIHDNVLKLDILGHDDPTMIRMLQDLSGIDPKTIPVDDKEVMQIFSTPESLGVTEDEILCKTGTFGVPEFGTGFVRQMLEDTKPTTFSELVQISGLSHGTDVWLGNAQELIKTGICDLSSVIGCRDDIMVYLMYAGLEPSMAFKIMESVRKGKGLTEEMIETMKENEVPDWYLDSCLKIKYMFPKAHAAAYVLMAVRIAYFKVHHPLYYYASYFTIRASDFDLITMIKDKTSIRNTVKDMYSRYMDLGKKEKDVLTVLEIMNEMAHRGYRMQPISLEKSQAFEFIIEGDTLIPPFISVPGLGENVAKRIVEARDDGPFLSKEDLNKKAGLSQKIIEYLDELGSLPNLPDKAQLSIFDM

SEQ ID NO: 642 - protein, 391 aa, Staphylococcus aureus
MSSNELLLATEYLEKEKKIPRAVLIDAIEAALITAYKKNYDSARNVRVELNMDQGTFKVIARKDVVEEVFDDRDEVDLSTALVKNPAYEIGDIYEEDVTPKDFGRVGAQAAKQAVMQRLRDAEREILFEEFIDKEEDILTGIIDRVDHRYVYVNLGRIEAVLSEAERSPNEKYIPNERIKVYVNKVEQTTKGPQIYVSRSHPGLLKRLFEQEVPEIYDGTVIVKSVAREAGDRSKISVFSENNDIDAVGACVGAKGARVEAVVEELGGEKIDIVQWNEDPKVFVKNALSPSQVLEVIVDETNQSTVVVVPDYQLSLAIGKRGQNARLAAKLTGWKIDIKSETDAREAGIYPVVEAEKVTEEDIALEDADTTESTEEVNDVSVETNVEKESE

SEQ ID NO: 643 - protein, 94 aa, Staphylococcus aureus
MKKKKIPMRKCILSNEMHPKKDMIRVVVNKEGEIFADVTGKKQGRGAYVSKDVAMVEKAQQKEILEKYFKASKEQLDPVYKEIIRLIYREEIPK

SEQ ID NO: 644 - protein, 705 aa, Staphylococcus aureus
MSKQRIYEYAKELNLKSKEIIDELKSMNIEVSNHMQALEDDQIKALDKKFKKEQKNDNKQSTQNNHQKSNNQNQNKGQQKDNKKNQQQNNKGNKGNKKNNRNNKKNNKNNKPQNQPAAPKEIPSKVTYQEGITVGEFADKLNVESSEIIKKLFLLGIVANINQSLNQETIELIADDYGVEVEEEVVINEEDLSIYFEDEKDDPEAIERPAVVTIMGHVDHGKTTLLDSIRHTKVTAGEAGGITQHIGAYQIENDGKKITFLDTPGHAAFTTMRARGAQVTDITILVVAADDGVMPQTIEAINHAKEAEVPIIVAVNKIDKPTSNPDRVMQELTEYGLIPEDWGGETIFVPLSALSGDGIDDLLEMIGLVAEVQELKANPKNRAVGTVIEAELDKSRGPSASLLVQNGTLNVGDAIVVGNTYGRIRAMVNDLGQRIKTAGPSTPVEITGINDVPQAGDRFVVFSDEKQARRIGESRHEASIVQQRQESKNVSLDNLFEQMKQGEMKDLNVIIKGDVQGSVEALAASLMKIDVEGVNVRIIHTAVGAINESDVTLANASNGIIIGFNVRPDSGAKRAAEAENVDMRLHRVIYNVIEEIESAMKGLLDPEFEEQVIGQAEVRQTFKVSKVGTIAGCYVTEGKITRNAGVRIIRDGIVQYEGELDTLKRFKDDAKEVAKGYECGITIENYNDLKEGDVIEAFEMVEIKR

SEQ ID NO: 645 - protein, 323 aa, Staphylococcus aureus
MKVIEVTHPIQSKQYITEDVAMAFGFFDGMHKGHDKVFDILNEIAEARSLKKAVMTFDPHPSVVLNPKRKRTTYLTPLSDKIEKISQHDIDYCIVVNFSSRFANVSVEDFVENYIIKNNVKEVIAGFDFTFGKFGKGNMTVLQEYDAFNTTIVSKQEIENEKISTTSIRQDLINGELQKANDALGYIYSIKGTVVQGEKRGRTIGFPTANIQPSDDYLLPRKGVYAVSIEIGTENKLYRGVANIGVKPTFHDPNKAEVVIEVNIFDFEDNIYGERVTVNWHHFLRPEIKFDGIDPLVKQMNDDKSRAKYLLAVDFGDEVAYNI

SEQ ID NO: 646 - protein, 234 aa, Staphylococcus aureus
MKALVLGGSGSIGSEIVKQLLTDGFEVYVQYYRTDINELTSKFNDDKVRFIQADLSQTIDIDKTFGDIKSLDCLIYASGQSLYGVLQDMKDHDIDACYQLNVLQLIRLCRYFVDVLRQSANGRIIVISSIWGETGASMETIYSAMKSAQLGFVKALSQELALTSVTVNAIAPGFVAGNMASEWQEDELQAMITELPQQRLVLPSEVAHTCAYLYHSNARSVTGTIQKVNGAWYI

SEQ ID NO: 647 - protein, 412 aa, Staphylococcus aureus
MAQQQIHDTKNKLEKAVLVGVHAQDDKQFNFESTMEELSSLSETCQLEVLGQITQNRDRVDRKYYVGKGKIEEIQAFIEFKDIDVVITNDELTTAQSKSLNEALGVKIIDRTQLILEIFALRARSKEGKLQVELAQLDYLLPRLQGHGKSLSRLGGGIGTRGPGETKLEMDRRHIRTRMNEIKHQLRTVEEHRERYRNKRNQNQVFQVALVGYTNAGKSSWFNVLANEETYEKDQLFATLDPKTRQIQINDGFNLIISDTVGFIQKLPTTLIAAFKSTLEEAKGADLLVHVVDSSHPEYRTQYDTVNDLIKQLDMSHISQIVIFNKKDLCDHASNRPASDLPNVFVSSKNDGDKLLVKTLFIDEIKRQLTYYDETIATNNADRLYFLKQHTLVTELKYDEIENVYRIKGFKK

SEQ ID NO: 648 - protein, 665 aa, Staphylococcus aureus
MAMNKQNNYSDDSIQVLEGLEAVRKRPGMYIGSTDKRGLHHLVYEIVDNSVDEVLNGYGNEIDVTINKDGSISIEDNGRGMPTGIHKSGKPTVEVIFTVLHAGGKFGQGGYKTSGGLHGVGASVVNALSEWLEVEIHRDGSIYHQSFKNGGSPSSGLVKKGKTKKTGTKVTFKPDDTIFKASTSFNFDVLSERLQESAFLLKNLKITLNDLRSGKERQEHYHYEEGIKEFVSYVNEGKEVLHDVATFSGEANGIEVDVAFQYNDQYSESILSFVNNVRTKDGGTHEVGFKTAMTRVFNDYARRINELKTKDKNLDGNDIREGLTAVVSVRIPEELLQFEGQTKSKLGTSEARSAVDSVVADKLPFYLEEKGQLSKSLVKKAIKAQQAREAARKAREDARSGKKNKRKDTLLSGKLTPAQSKNTEKNELYLVEGDSAGGSAKLGRDRKFQAILPLRGKVINTEKARLEDIFKNEEINTIIHTIGAGVGTDFKIEDSNYNRVIIMTDADTDGAHIQVLLLTFFFKYMKPLVQAGRVFIALPPLYKLEKGKGKTKRVEYAWTDEELNKLQKELGKGFTLQRYKGLGEMNPEQLWETTMNPETRTLIRVQVEDEVRSSKRVTTLMGDKVQPRREWIEKHVEFGMQEDQSILDNSEVQVLENDQFDEEEI

SEQ ID NO: 649 - protein, 800 aa, Staphylococcus aureus
MSEIIQDLSLEDVLGDRFGRYSKYIIQERALPDVRDGLKPVQRRILYAMYSSGNTHDKNFRKSAKTVGDVIGQYHPHGDFSVYEAMVRLSQDWKLRHVLIEMHGNNGSIDNDPPAAMRYTEAKLSLLAEELLRDINKETVSFIPNYDDTTLEPMVLPSRFPNLLVNGSTGISAGYATDIPPHNLAEVIQATLKYIDNPDITVNQLMKYIKGPDFPTGGIIQGIDGIKKAYESGKGRIIVRSKVEEETLRNGRKQLIITEIPYEVNKSSLVKRIDELRADKKVDGIVEVRDETDRTGLRIAIELKKDVNSESIKNYLYKNSDLQISYNFNMVAISDGRPKLMGIRQIIDSYLNHQIEVVANRTKFELDNAEKRMHIVEGLIKALSILDKVIELIRSSKNKRDAKENLIEVFEFTEEQAEAIVMLQLYRLTNTDIVALEGEHKELEALIKQLRHILDNHDALLNVIKEELNEIKKKFKSERLSLIEAEIEEIKIDKEVMVPSEEVILSMTRHGYIKRTSIRSFNASGVEDIGLKDGDSLLKHQEVNTQDTVLVFTNKGRYLFIPVHKLADIRWKELGQHVSQIVPIEEDEVVINVFNEKDFNTDAFYVFATQNGMIKKSTVPLFKTTRFNKPLIATKVKENDDLISVMRFEKDQLITVITNKGMSLTYNTSELSDTGLRAAGVKSINLKAEDFVVMTEGVSENDTILMATQRGSLKRISFKILQVAKRAQRGITLLKELKKNPHRIVAAHVVTGEHSQYTLYSKSNEEHGLINDIHKSEQYTNGSFIVDTDDFGEVIDMYIS

SEQ ID NO: 650 - protein, 327 aa, Staphylococcus aureus
MKKWQFVGTTALGATLLLGACGGGNGGSGNSDLKGEAKGDGSSTVAPIVEKLNEKWAQDHSDAKISAGQAGTGAGFQKFIAGDIDFADASRPIKDEEKQKLQDKNIKYKEFKIAQDGVTVAVNKENDFVDELDKQQLKAIYSGKAKTWKDVNSKWPDKKINAVSPNSSHGTYDFFENEVMNKEDIKAEKNADTNAIVSSVTKNKEGIGYFGYNFYVQNKDKLKEVKIKDENGKATEPTKKTIQDNSYALSRPLFIYVNEKALKDNKVMSEFIKFVLEDKGKAAEEAGYVAAPEKTYKSQLDDLKAFIDKNQKSDDKKSDDKKSEDKK

SEQ ID NO: 651 - protein, 308 aa, Staphylococcus aureus
MTSSTNVKALIEKNINKKGKHNDKIIPVILAAISAISILTTLGILITLLLETITFFTRIPITEFLFSTTWNPTGSDPKFGIWALIIGTLKITVIATIFAVPVGLGAAIYLSEYASDRARRIIKPILEILAGIPTIVFGFFALTYVTPVLRSFISGLGEFNAISPGLVVGIMIVPLITSLSEDAMASVPNKIREGAYGLGATKLEVATKVVLPAATSGIVASIVLAISRAIGETMIVSLAAGSSPTASLSLTSSIQTMTGYIVEIATGDATFGSNIYYSIYAVGFTLFIFTLIMNLLSQWISKRFREEY

SEQ ID NO: 652 - protein, 466 aa, Staphylococcus aureus
MDRMYEQNQMPHNNEAEQSVLGSIIIDPELINTTQEVLLPESFYRGAHQHIFRAMMHLNEDNKEIDVVTLMDQLSTEGTLNEAGGPQYLAELSTNVPTTRNVQYYTDIVSKHALKRRLIQTADSIANDGYNDELELDAILSDAERRILELSSSRESDGFKDIRDVLGQVYETAEELDQNSGQTPGIPTGYRDLDQMTAGFNRNDLIILAARPSVGKTAFALNIAQKVATHEDMYTVGIFSLEMGADQLATRMICSSGNVDSNRLRTGTMTEEDWSRFTIAVGKLSRTKIFIDDTPGIRINDLRSKCRRLKQEHGLDMIVIDYLQLIQGSGSRASDNRQQEVSEISRTLKALARELECPVIALSQLSRGVEQRQDKRPMMSDIRESGSIEQDADIVAFLYRDDYYNRGGDEDDDDDGGFEPQTNDENGEIEIIIAKQRNGPTGTVKLHFMKQYNKFTDIDYAHADMM

SEQ ID NO: 653 - protein, 356 aa, Staphylococcus aureus
MTKIAFTGGGTVGHVSVNLSLIPTALSQGYEALYIGSKNGIEREMIESQLPEIKYYPISSGKLRRYISLENAKDVFKVLKGILDARKVLKKEKPDLLFSKGGFVSVPVVIAAKSLNIPTIIHESDLTPGLANKIALKFAKKIYTTFEETLNYLPKEKADFIGATIREDLKNGNAHNGYQLTGFNENKKVLLVMGGSLGSKKLNSIIRENLDALLQQYQVIHLTGKGLKDAQVKKSGYIQYEFVKEDLTDLLAITDTVISRAGSNAIYEFLTLRIPMLLVPLGLDQSRGDQIDNANHFADKGYAKTIDEEQLTAQILLQELNEMEQERTRIINNMKSYEQSYTKEALFDKMIKDALN

SEQ ID NO: 654 - protein, 318 aa, Staphylococcus aureus
MLNSFDAAYHSLCEEVLEIGNTRNDRTNTGTISKFGHQLRFDLSKGFPLLTTKKVSFKLVATELLWFIKGDTNIQYLLKYNNNIWNEWAFENYIKSDEYNGPDMTDFGHRALSDPEFNEQYKEQMKQFKQRILEDDTFAKQFGDLGNVYGKQWRDWVDKDGNHFDQLKTVIEQIKHNPDSRRHIVSAWNPTEIDTMALPPCHTMFQFYVQDGKLSCQLYQRSADIFLGVPFNIASYALLTHLIAKECGLEVGEFVHTFGDAHIYSNHIDAIQTQLARESFNPPTLKINSDKSIFDINYEDLEIVDYESHPAIKAPIAV

SEQ ID NO: 655 - protein, 159 aa, Staphylococcus aureus
MTLSILVAHDLQRVIGFENQLPWHLPNDLKHVKKLSTGHTLVMGRKTFESIGKPLPNRRNVVLTSDTSFNVEGVDVIHSIEDIYQLPGHVFIFGGQTLFEEMIDKVDDMYITVIEGKFRGDTFFPPYTFEDWEVASSVEGKLDEKNTIPHTFLHLIRKK

SEQ ID NO: 656 - protein, 208 aa, Staphylococcus aureus
MNYPNGKPYRKNSAIDGGKKTAAFSNIEYGGRGMSLEKDIEHSNTFYLKSDIAVIHKKPTPVQIVNVNYPKRSKAVINEAYFRTPSTTDYNGVYQGYYIDFEAKETKNKTSFPLNNIHDHQVEHMKNAYQQKGIVFLMIRFKTLDEVYLLPYSKFEVFWKRYKDNIKKSITVDEIRKNGYHIPYQYQPRLDYLKAVDKLILDESEDRV

SEQ ID NO: 657 - protein, 380 aa, Staphylococcus aureus
MKIGITCYPSMGGSGIIATELGIKLAERGHEVHFITSNIPFRIRKPLPNMIFHQVEVNQYAVFQYPPYDITLSTKIAEVIKEYDLDLLHMHYAVPHAICGILAREMSGKDIKIMTTLHGTDITVLGYDHSLQGAIKFGIEKSDIVTSVSKSLAQETHEIIETNKEIIPIYNFVRENEFPTKHNTALKSQFGIAPDEKVLIHVSNFRQVKRIDTIIETFAKVREKIPSKLILLGDGPELVPMRQLTKELNVEEDVLFLGKQDCVSEFYQLSDLVLLLSEKESFGLTLLEAMKTGVVPIGSNAGGIKEVIKHGETGFVVDVGDCDSASDYAIRLLEDKALYNKLQKNMLADIAERFGSELITDQYEYYYQKMLNEHNKSKGE

SEQ ID NO: 658 - protein, 400 aa, Staphylococcus aureus
MDKSLFEQARPILEQIQDNGFEAYYVGGSVRDYVMGRNIHDIDITTSATPDEIESIFSHTIPVGKEHGTINVVFNDENYEVTTFRAEEDYVDHRRPSGVTFVRDLYEDLQRRDFTMNAIAMDTAYKLYDYFDGQQDINNRIIRTVGIAEERFQEDALRMIRCLRFQSQLSFDIAMETFEAMRTQMADIKFLSIERIVIELTKLMRGINVEESFNHLKSLKAFNYMPYFEQLDMNQINVTEPIDLELLIAIVSVKFDINYSLKPLKLSNRQVKDINQYIQIMNALPSIITKEQLKMFVYDYDTNLIKNVMVAADVLKANDIQGHEPLIVNLQTIDETLHRLPMHNRKDMMVNGGVLMAHLNAKSGPWLKDVLRQIEIAIVTGKVSNEETEILKWVDNHVKI

SEQ ID NO: 659 - protein, 319 aa, Staphylococcus aureus
MAKLNMNNEIKKVEQRLEKAIKSKDSVLEQASLHLLSSGGKRVRPAFVILSSQFGKDEQTSEQTYQVAVALELIHMATLVHDDVIDKSDKRRGKLTISKKWDQTTAILTGNFLLALGLEHLMAVKDNRVHQLISESIVDVCRGELFQFQDQFNSQQTIINYLRRINRKTALLIQISTEVGAITSQSDKETVRKLKMIGHYIGMSFQIIDDVLDFTSTEKKLGKPVGSDLLNGHITLPILLEMRKNPDFKLKIEQLRRDSERKEFEECIQIIRKSDSIDEAKAVSSKYLSKALNLISELPDGHPKSLLLSLTKKMGSRNT

SEQ ID NO: 660 - protein, 436 aa, Staphylococcus aureus
MTKPIVAIVGRPNVGKSTIFNRIVGERVSIVEDTPGVTRDRIYSSGEWLTHDFNIIDTGGIEIGDAPFQTQIRAQAEIAIDEADVIIFMVNVREGLTQSDEMVAQILYKSKKPVVLAVNKVDNMEMRTDVYDFYSLGFGEPYPISGSHGLGLGDLLDAVVSHFGEEEEDPYDEDTIRLSIIGRPNVGKSSLVNAILGEDRVIVSNVAGTTRDAIDTEYSYDGQDYVLIDTAGMRKKGKVYESTEKYSVLRALKAIERSNVVLVVIDAEQGIIEQDKRVAGYAHEQGKAVVIVVNKWDTVEKDSKTMKKFEDEVRKEFQFLDYAQIAFVSAKERTRLRTLFPYINEASENHKKRVQSSTLNEVVTDAISMNPTPTDKGRRLNVFYATQVAIEPPTFVVFVNDVELMHFSYKRYLENQIRAAFGFEGTPIHIIARKRN

SEQ ID NO: 661 - protein, 468 aa, Staphylococcus aureus
MTQQIGVIGLAVMGKNLAWNIESHGYSVSVFNRSSEKTDLMVEESKGKNIHPTYSLEEFVNSLEKPRKILLMVQAGKATDATIDSLLPLLDDGDILIDGGNTNYQDTIRRNKALAQSAINFIGMGVSGGEIGALTGPSLMPGGQEEAYNKVADILDAIAAKAKDGASCVTYIGPNGAGHYVKMVHNGIEYADMQLIAESYAMMKELLGMSHEDIAQTFKDWNAGELESYLIEITGDIFMKLDENKEALVEKILDTAGQKGTGKWTSINALELGIPLTIITESVFARFISSIKEERVNASKELNGPKASFDGDKKDFLEKIRKALYMSKICSYAQGFAQMRKASEDNEWNLKLGDLAMIWREGCIIRAQFLQKIKDAYDNNPGLQNLLLDPYFKNIVTEYQDALRDVVATGVQNGVPTPGFSSSINYYDSYRAADLPANLIQAQRDYFGAHTYERKDKEGVFHTQWIEE

SEQ ID NO: 662 - protein, 473 aa, Staphylococcus aureus
MSEKQYDLVVLGGGTAGYVAAIRASQLGKKVAIVERQLLGGTCLHKGCIPTKSLLKSAEVFQTVKQAAMFGVDVKDANVNFENMLARKEDIINQMYQGVKHLMQHNHIDIYNGTGRILGTSIFSPQSGTISVEYEDGESDLLPNQFVLIATGSSPAELPFLSFDHDKILSSDDILSLKTLPSSIGIIGGGVIGMEFASLMIDLGVDVTVIEAGERILPTESKQASQLLKKSLSARGVKFYEGIKLSENDINVNEDGVTFEISSDIIKVDKVLLSIGRKPNTSDIGLNNTKIKLSTSGHILTNEFQQTEDKHIYAAGDCIGKLQLAHVGSKEGVVAVDHMFEGNPIPVNYNMMPKCIYSQPEIASIGLNIEQAKAEGMKVKSFKVPFKAIGKAVIDSHDANEGYSEMVIDQSTEEIVGINMIGPHVTELINEASLLQFMNGSALELGLTTHAHPSISEVLMELGLKAESRAIHV

SEQ ID NO: 663 - protein, 327 aa, Staphylococcus aureus
MAKLSYLEAIRQAQDLALQQNKDVFILGEDVGKKGGVFGTTQGLQQQYGEDRVIDTPLAESNIVGTAIGAAMVGKRPIAEIQFADFILPATNQIISEAAKMRYRSNNDWQCPLTIRAPFGGGVHGGLYHSQSIESIFASSPGLTIVIPSTPYDAKGLLLSSIESNDPVLYFEHKKAYRFLKEEVPEEYYTVPLGKADVKREGEDLTVFCYGLMVNYCLQAADILAADGINVEVVDLRTVYPLDKETIIDRAKNTGKVLLVTEDNLEGSIMSEVSAIIAEHCLFDLDAPIMRLAAPDVPSMPFSPVLENEIMMNPEKILNKMRELAEF

SEQ ID NO: 664 - protein, 154 aa, Staphylococcus aureus
MNFKEIKELIEILDKSTLTEINIEDTKGKVTLKKEKETEIITPQISQMPVEAAAMPMPQAQSTDSNKTEAPKPTSDNHKTINAPMVGTFYKSPSPDEEAYVQVGDTVSNETTVCILEAMKLFNEIQAEISGEIVEILVEDGQMVEYGQPLFKVK

SEQ ID NO: 665 - protein, 451 aa, Staphylococcus aureus
MKKVLIANRGEIAVRIIRACRDLGIQTVAIYSEGDKDALHTQIADEAYCVGPTLSKDSYLNIPNILSIATSTGCDGVHPGYGFLAENADFAELCEACQLKFIGPSYQSIQKMGIKDVAKAEMIKANVPVVPGSDGLMKDVSEAKKIAKKIGYPVIIKATAGGGGKGIRVARDEKELETGFRMTEQEAQTAFGNGGLYMEKFIENFRHIEIQIVGDSYGNVIHLGERDCTIQRRMQKLVEEAPSPILDDETRREMGNAAVRAAKAVNYENAGTIEFIYDLNDNKFYFMEMNTRIQVEHPVTEMVTGIDLVKLQLQVAMGDVLPYKQEDIKLTGHAIEFRINAENPYKNFMPSPGKIEQYLAPGGYGVRIESACYTNYTIPPYYDSMVAKLIIHEPTRDEAIMAGIRALSEFVVLGIDTTIPFHIKLLNNDIFRSGKFNTNFLEQNSIMNDEG

SEQ ID NO: 666 - protein, 129 aa, Staphylococcus aureus
MSRKESRVQAFQTLFQLEMKDSDLTINEAISFIKDDNPDLDFEFIHWLVSGVKDHEPVLDETISPYLKDWTIARLLKTDRIILRMATYEILHSDTPAKVVMNEAVELTKQFSDDDHYKFINGVLSNIKK

SEQ ID NO: 667 - protein, 605 aa, Staphylococcus aureus
MRIDQSIINEIKDKTDILDLVSEYVKLEKRGRNYIGLCPFHDEKTPSFTVSEDKQICHCFGCKKGGNVFQFTQEIKDISFVEAVKELGDRVNVAVDIEATQSNSNVQIASDDLQMIEMHELIQEFYYYALTKTVEGEQALTYLQERGFTDALIKERGIGFAPDSSHFCHDFLQKKGYDIELAYEAGLLSRNEENFSYYDRFRNRIMFPLKNAQGRIVGYSGRTYTGQEPKYLNSPETPIFQKRKLLYNLDKARKSIRKLDEIVLLEGFMDVIKSDTAGLKNVVATMGTQLSDEHITFIRKLTSNITLMFDGDFAGSEATLKTGQHLLQQGLNVFVIQLPSGMDPDEYIGKYGNDAFTTFVKNDKKSFAHYKVSILKDEIAHNDLSYERYLKELSHDISLMKSSILQQKAINDVAPFFNVSPEQLANEIQFNQAPANYYPEDEYGGYDEYGGYIEPEPIGMAQFDNLSRQEKAERAFLKHLMRDKDTFLNYYESVDKDNFTNQHFKYVFEVLHDFYAENDQYNISDAVQYVNSNELRETLISLEQYNLNDEPYENEIDDYVNVINEKGQETIESLNHKLREATRIGDVELQKYYLQQIVAKNKERM

SEQ ID NO: 668 - protein, 368 aa, Staphylococcus aureus
MSDNTVKIKKQTIDPTLTLEDVKKQLIEKGKKEGHLSHEEIAEKLQNFDIDSDQMDDFFDQLNDNDISLVNEKDSSDTDEKLNPSDLSAPPGVKINDPVRMYLKEIGRVNLLSAQEEIELAKRIEQGDEVAKSRLAEANLRLVVSIAKRYVGRGMLFLDLIQEGNMGLIKAVEKFDFNKGFKFSTYATWWIRQAITRAIADQARTIRIPVHMVETINKLIRVQRQLLQDLGRDPAPEEIGEEMDLPAEKVREILKIAQEPVSLETPIGEEDDSHLGDFIEDQEAQSPSDHAAYELLKEQLEDVLDTLTDREENVLRLRFGLDDGRTRTLEEVGKVFGVTRERIRQIEAKALRKLRHPSRSKRLKDFMD

SEQ ID NO: 669 - protein, 225 aa, Staphylococcus aureus
MISLNNRLTTVSRFLKQGTIADIGSDHAYLPIYAIQNHLCECGIAGEVIQGPFQAAVKNVAANHLVERIDVRLGDGLSVIHPEDVIDNITICGMGGPLIAKILKDGQDKLSQHPRLILQSNIQTENLRQTLQQLNYEIIDEIIMEEKGHIYEIVVAEHSTQLIELSSDELKFGPKLLNNKNEYFIKKWQRELEALYHIKSKLNTEQHHQRLAQINDEIAVIERVL

SEQ ID NO: 670 - protein, 448 aa, Staphylococcus aureus
MAKHPFEQFNLESSLIDAVKDLNFEKPTEIQNRIIPRILKRTNLIGQSQTGTGKSHAFLLPLMQLIDSEIKEPQAIVVAPTRELAQQLYDAANHLSQFKAGVSVKVFIGGTDIEKDRQRCNAQPQLIIGTPTRINDLAKTGHLHVHLASYLVIDEADLMIDLGLIEDVDYIAARLEDNANIAVFSATIPQQLQPFLNKYLSHPEYVAVDSKKQNKKNIEFFLIPTKGAAKVEKTLNLIDILNPYLCIIFCNSRDNANDLARSLNEAGIKVGMIHGGLTPRERKQQMKRIRNLEFQYVIASDLASRGIDIEGVSHVINFDVPNDIDFFTHRVGRTGRGNYKGVAITLYSPDEEHNISLIEDRGFVFNTVDIKDGELKEVKAHNQRQARMRKDDHLTNQVKDKVRSKIKNKVKPGYKKKFKQEVEKMKRQERKQFSKQQNRQKRKQNKKG

SEQ ID NO: 671 - protein, 299 aa, Staphylococcus aureus
MTEHKSGFVSIIGRPNVGKSTFVNRVIGHKIAIMSDKAQTTRNKIQGVMTRDDAQIIFIDTPGIHKPKHKLGDYMMKVAKNTLSEIDAIMFMVNANEEIGRGDEYIIEMLKNVKTPVFLVLNKIDLVHPDELMPKIEEYQSYMDFTEIVPISALEGLNVDHFIDVLKTYLPEGPKYYPDDQISDHPEQFVVGEIIREKILHLTSEEIPHAIGVNVDRMVKESEDRVHIEATIYVERDSQKGIVIGKGGKKLKEVGKRARRDIEMLLGSKVYLELWVKVQRDWRNKVNFIRQIGYVEDQD

SEQ ID NO: 672 - protein, 208 aa, Staphylococcus aureus
MTNKDESVEKNTESTVEETNIKQNIDDSVEQAEESKGHLQDEAIEETSDENVIEEIDPKDQKINELQQLADENEEKYLRLYAEFENYKRRIQKENEINKTYQAQRVLTDILPAIDNIERALQIEGDDETFKSLQKGVQMVHESLINALKDNGLEVIKTEGEAFDPNIHQAVVQDDNPDFESGEITQELQKGYKLKDRVLRPSMVKVNQ

SEQ ID NO: 673 - protein, 610 aa, Staphylococcus aureus
MSKIIGIDLGTTNSCVTVLEGDEPKVIQNPEGSRTTPSVVAFKNGETQVGEVAKRQAITNPNTVQSIKRHMGTDYKVDIEGKSYTPQEISAMILQNLKNTAESYLGEKVDKAVITVPAYFNDAERQATKDAGKIAGLEVERIINEPTAAALAYGLDKTDKDEKVLVFDLGGGTFDVSILELGDGVFEVLSTAGDNKLGGDDFDQVIIDYLVAEFKKENGVDLSQDKMALQRLKDAAEKAKKDLSGVSQTQISLPFISAGENGPLHLEVNLTRSKFEELSDSLIRRTMEPTRQAMKDAGLTNSDIDEVILVGGSTRIPAVQEAVKKEIGKEPNKGVNPDEVVAMGAAIQGGVITGDVKDVVLLDVTPLSLGIEILGGRMNTLIERNTTIPTSKSQIYSTAVDNQPSVDVHVLQGERPMAADNKTLGRFQLTDIPPAERGKPQIEVTFDIDKNGIVNVTAKDLGTNKEQRITIQSSSSLSDEEIDRMVKDAEVNAEADKKRREEVDLRNEADSLVFQVEKTLTDLGENIGEEDKKSAEEKKDALKTALEGQDIEDIKSKKEELEKVIQELSAKVYEQAAQQQQQAQGANAGQNNDSTVEDAEFKEVKDDDKK

SEQ ID NO: 674 - protein, 175 aa, Staphylococcus aureus
MGLVRKFFMPNSYVQSIFQIDLDKLVDKGVKGIITDLDNTLVGWDVKEPTERVKAWFKEANEKGITITIVSNNNESRVASFSQHLDIDFIFKARKPMGKAFDKAITKMNIRPDQTVVIGDQMLTDVFGGNRRGLYTIMVVPVKRTDGFITKVNRLIERRLLRHFSKKGYITWEEN

SEQ ID NO: 675 - protein, 366 aa, Staphylococcus aureus
MSDILKCIGCGAPLQSEDKNKPGFVPEHNMFRDDVICRRCFRLKNYNEVQDVGLESEDFLKLLSGLADKKGIVVNVVDVFDFEGSFINAVKRIVGNKKIILAANKLDLLPKQINKRRVKEWLKRTARKYGLEADDVVLISAEKGWGIDDLLSSIANIRENEDVYIVGTTNVGKSTLINKLIEASVGEKDVVTTSRFPGTTLDMIDIPLDESSFMYDTPGIIQDHQMTHLVSEKELKIIMPKKEIKQRVYQLNEAQTLFFGGLARIDYVSGGKRPLVCFFSNDLNIHRTKTEKANDLWRNQLGDLLTPPGNPQNFDLNELKAVRLETGKEKRDVMISGLGFITIGPGAKVIVRVPKNVDVVLRNSIL

SEQ ID NO: 676 - protein, 268 aa, Staphylococcus aureus
MKFAVIGNPISHSLSPVMHRANFNSLGLDDTYEALNIPIEDFHLIKEIISKKELDGFNITIPHKERIIPYLDYVDEQAINAGAVNTVLIKDGKWIGYNTDGIGYVKGLHSVYPDLENAYILILGAGGASKGIAYELAKFVKPKLTVANRTMARFESWNLNINQISLADAEKYLAEFDIVINTTPAGMAGNNESIINLKHLSPNTLMSDIVYIPYKTPILEEAERKGNHIYNGLDMFVYQGAESFKIWTNKDADINSMKTAVLQQLKGE

SEQ ID NO: 677 - protein, 189 aa, Staphylococcus aureus
MKKIVLYGGQFNPIHTAHMIVASEVFHELQPDEFYFLPSFMSPLKKHNNFIDVQHRLTMIQMIIDELGFGDICDDEIKRGGQSYTYDTIKAFKEQHKDSELYFVIGTDQYNQLEKWYQIEYLKEMVTFVVVNRDKNSQNVENAMIAIQIPRVDISSTMIRQRVSEGKSIQVLVPKSVENYIKGEGLYEH

SEQ ID NO: 678 - protein, 324 aa, Staphylococcus aureus
MSDNIVAIYGDVPELVEKQSAEIISQFLKSDRDDFNFVKYNLYETEIAPIVEETLTLPFFSDKKAILVKNAYIFTGEKAPKDMAHNVDQLIEFIEKYDGENLIVFEIYQNKLDERKKLTKTLKKHARLKKIEQMSEEEIKKWIQSKLNENFKDIKRDALDLFIELTGINFNIVSQEIEKLILFLGDRPTINKQDVNQIINRSLEQNVFLLTEYIQKRKKEQAIHLVKDLITMKEEPIKLLALITSNYRLFYQCKILSQKGYSGQQIAKTIGVHPYRVKLALGQVRHYQLDELLNIVDACAETDYKLKSSYMDKQLILELFILSL

SEQ ID NO: 679 - protein, 158 aa, Staphylococcus aureus
MENQKQYPMTQEGFEKLERELEELKTVKRPEVVEKIKVARSFGDLSENSEYDAAKDEQGFIEQDIQRIEHMLRNALIIEDTGDNNVVKIGKTVTFVELPGDEEESYQIVGSAESDAFNGKISNESPMAKALIGKGLDDEVRVPLPNGGEMNVKIVNIQ

SEQ ID NO: 680 - protein, 876 aa, Staphylococcus aureus
MKKLKASEIRQKYLDFFVEKGHMVEPSAPLVPIDDDTLLWINSGVATLKKYFDGRETPKKPRIVNSQKAIRTNDIENVGFTARHHTFFEMLGNFSIGDYFKQEAIEFAWEFLTSDKWMGMEPDKLYVTIHPEDMEAYNIWHKDIGLEESRIIRIEGNFWDIGEGPSGPNTEIFYDRGEAYGQDDPAEEMYPGGENERYLEVWNLVFSEFNHNKDHSYTPLPNKNIDTGMGLERMASVSQNVRTNYETDLFMPIMNEIEKVSGKQYLVNNEQDVAFKVIADHIRTIAFAISDGALPANEGRGYVLRRLLRRAVRFSQTLGINEPFMYKLVDIVADIMEPYYPNVKEKADFIKRVIKSEEERFHETLEDGLAILNELIKKAKATTNEINGKDAFKLYDTYGFPIELTEEIAVQAGLKVDMTTFESEMQQQRDRARQARQNSQSMQVQSEVLKNITSASTFVGYDTATAQTTLTHLIYNGEEVSQVEAGETVYFMLTETPFYAVSGGQVADTGIVYNDNFEIAVSEVTKAPNGQNLHKGVVQFGQVNVGATVSAEVNQNDRRDIQKNHSATHLLHAALKSVLGDHVNQAGSLVEADRLRFDFSHFGPMTNDEIDQVERLVNEEIWKGIDVNIQEMDIASAKEMGAMALFGEKYGDVVRVVNMAPFSIELCGGIHVRNTSEIGLFKIVSESGTGAGVRRIEALTGKAAFLYLEDIQEKFNTMKSQMKVKSDDQVVEKLTQLQDEEKALLKQLEQRDKEITSLKMGNIEDQVEEINGYKVLVTEVDVPNAKAIRSTMDDFKSKLQDTIIILASNVDDKVSMVATVPKSLTNNVKAGDLIKQMAPIVGGKGGGRPDMAQGGGTQPENISKSLSFIKDYIKNL

SEQ ID NO: 681 - protein, 123 aa, Staphylococcus aureus
MSDIMGWTAQGLDTLRINEENNELGIDQLVDIIKKHNVGTVVIGLPKNMNNSIGFRGEASLTYKEKLLEAYPSIEIVMWDERLSTMAAERSLLEADVSRQKRKQVIDKMAAVFILQGYLDSLH

SEQ ID NO: 682 - protein, 380 aa, Staphylococcus aureus
MEIYADYAATTPVKPEVVDAMMMIYNSHYGNPSSIHAKGRDARKYLDESRRQIAQLLGADTHEIIFTSGATESNNTAIKGIVKANEQLGNHIITSKIEHHSVLHVFEQLEREGFDVTYLDVDDTGAIDLDQLEETITDKTILVSIMFVNNEVGTVQQIYDIQDIIAETNAYFHVDAVQAIGHLDVKFDEFEIDAMSITAHKFGGPKGVGALLVKDHVTLDYPQLGGEQELKRRAGTENLAQIVGMAKALQLAEKNRDDNNIHLMNLKEQFLVKLQERAIPFELNGSMTDATGHIVNLYFPFVEVEMMLTLLDMAQIYVSSGSACTAGSTQPSHVLDAMFEDEERSNHSIRFSFNELTTENEINAIVAEIHKIYFKFKEES

SEQ ID NO: 683 - protein, 372 aa, Staphylococcus aureus
MSNKDIRVVVGMSGGVDSSVTAHVLKEQGYDVIGIFMKNWDDTDENGVCTATEDYNDVIEVCNQIGIPYYAVNFEKEYWDKVFTYFLDEYKKGRTPNPDVMCNKEIKFKAFLDHAMNLGADYVATGHYARIHRHEDGHVEMLRGVDNNKDQTYFLNQLSQQQLSKVMFPIGDIEKSEVRRIAEEQGLVTAKKKDSTGICFIGEKNFKTFLSQYLPAQPGDMITLDGKKMGKHSGLMYYTIGQRHGLGIGGDGDPWFVVGKNLKDNVLYVEQGFHHDALYSDYLIASDYSFVNPEDNDLDQGFECTAKFRYRQKDTKVFVKRENDHALRVTFAEPVRAITPGQAVVFYQGDVCLGGATIDDVFKNEGQLNFVV

SEQ ID NO: 684 - protein, 420 aa, Staphylococcus aureus
MIKIPRGTQDILPEDSKKWRYIENQLDELMTFYNYKEIRTPIFESTDLFARGVGDSTDVVQKEMYTFKDKGDRSITLRPEGTAAVVRSYIEHKMQGNPNQPIKLYYNGPMFRYERKQKGRYRQFNQFGVEAIGAENPSVDAEVLAMVMHIYQSFGLKHLKLVINSVGDMASRKEYNEALVKHFEPVIHEFCSDCQSRLHTNPMRILDCKVDRDKEAIKTAPRITDFLNEESKAYYEQVKAYLDDLGIPYIEDPNLVRGLDYYTHTAFELMMDNPNYDGAITTLCGGGRYNGLLELLDGPSETGIGFALSIERLLLALEEEGIELDIEENLDLFIVTMGDQADRYAVKLLNHLRHNGIKADKDYLQRKIKGQMKQADRLGAKFTIVIGDQELENNKIDVKNMTTGESETIELDALVEYFKK

SEQ ID NO: 685 - protein, 430 aa, Staphylococcus aureus
MFVDQVKISLKAGDGGNGITAYRREKYVPFGGPAGGDGGKGASVVFEVDEGLRTLLDFRYQRHFKASKGENGQSSNMHGKNAEDLVLKVPPGTIIKNVETDEVLADLVEDGQRAVVAKGGRGGRGNSRFATPRNPAPDFSEKGEPGEELDVSLELKLLADVGLVGFPSVGKSTLLSIVSKAKPKIGAYHFTTIKPNLGVVSTPDQRSFVMADLPGLIEGASDGVGLGHQFLRHVERTKVIVHMIDMSGSEGREPIEDYKVINQELAAYEQRLEDRPQIVVANKMDLPESQDNLNLFKEEIGEDVPVIPVSTITRDNIDQLLYAIADKLEEYKDVDFTVEEEESVGINRVLYKHTPSQDKFTISRDDDGAYVVSGNAIERMFKMTDFNSDPAVRRFARQMRSMGIDDALRERGCKNGDIVRILGGEFEFVE

SEQ ID NO: 686 - protein, 200 aa, Staphylococcus aureus
MYAYVKGKLTHLYPTHVVVETAGVGYEIQTPNSYRFQKHLDHEVLIRTSLIVREDAQLLYGFSSEEEKDMFLSLIKVTGIGPKSALAILATSTPNEVKRAIENENDTYLTKFPGIGKKTARQIVLDLKGKVKITEEDSDSLLQVDATSTVQDQFVQEAMLALEALGYSKRELAKVEKTLNKNKYDSVDEAVKAGLQLVVS

SEQ ID NO: 687 - protein, 334 aa, Staphylococcus aureus
MNERMVDQSMHSEETDFELSLRPTRLRQYIGQNSIKSNLEVFIKAAKLRHEPLDHVLLFGPPGLGKTTLSNIIANEMEVNIRTVSGPSLERPGDLAAILSGLQPGDVLFIDEIHRLSSVVEEVLYPAMEDFFLDIIIGKGDEARSIRIDLPPFTLVGATTRAGSLTGPLRDRFGVHLRLEYYNESDLKEIIIRTAEVLGTGIDEESAIELAKRSRGTPRVANRLLKRVRDFQQVNEDEQIYIETTKHALGLLQVDQHGLDYIDHKMMNCIIKQYNGGPVGLDTIAVTIGEERITIEDVYEPFLIQKGFLERTPRGRKATPLAYEHFAKSNEERG

SEQ ID NO: 688 - protein, 102 aa, Staphylococcus aureus
MFAIIETGGKQIKVEEGQEIFVEKLDVNEGDTFTFDKVLFVGGDSVKVGAPTVEGATVTATVNKQGRGKKITVFTYKRRKNSKRKKGHRQPYTKLTIDKINA

SEQ ID NO: 689 - protein, 99 aa, Staphylococcus aureus
MWCITMVKIDLQFFASKKGVSSTKNGRDSESKRLGAKRADGQFVTGGSILYRQRGTKIYPGENVGRGGDDTLFAKIDGVVKFERKGRDKKQVSVYAVAE

SEQ ID NO: 690 - protein, 876 aa, Staphylococcus aureus
MEMKPKYDPREVEAGRYEEWVKNGYFKPSEDKSKETYTIVIPPPNVTGKLHLGHAWDTTLQDIITRMKRMQGYDTLYLPGMDHAGIATQAKVEAKLNEQGITRYDLGREKFLEQAWDWKEEYASFIRAQWAKLGLGLDYSRERFTLDEGLSKAVKKVFVDLYNKGIIYRGERIINWDPKARTALSDIEVIHEDVQGAFYHFKYPYADGEGFIEIATTRPETMLGDTAIVVNPNDERYKDVIGKTVILPIVGRELPILADEYVDIDFGSGAMKVTPAHDPNDFEIGQRHQLENIIVMDENGKMNDKAGKYEGMDRFDCRKQLVKDLKEQDLVIKIEDHFHSVGHSERSGAVVEPYLSTQWFVRMEDLAKRSLDNQKTDDRIDFYPQRFEHTFNQWMENIRDWTISRQLWWGHQIPAWYHKETGEIYVGEEAPTDIENWQQDEDVLDTWFSSALWPFSTLGWPDLESEDFKRYYPTNALVTGYDIIFFWVARMIFQGLEFTDRRPFNDVLLHGLVRAEDGRKMSKSLGNGVDPMDVIDEYGADSLRYFLATGSSPGHDLRYSTEKVESVWNFINKIWNGARFSLMNIGEDFKVEDIDLSGNLSLADKWILTRLNETIATVTDLSDKYEFGEVGRALYNFIWDDFCDWYIEMSKIPMNSNDEEQKQVTRSVLSYTLDNIMRMLHPFMPFVTEKIWQSLPHEGDTIVKASWPEVRESLIFEESKQTMQQLVEIIKSVRQSRVEVNTPLSKEIPILIQAKDKEIETTLSQNKDYLIKFCNPSTLNISTDVEIPEKAMTSVVIAGKVVLPLEGLIDMDKEISRLEKELAKLQSELDRVDKKLSNENFVSKAPEKVINEEKRKKQDYQEKYDGVKARIEQLKA

SEQ ID NO: 691 - protein, 420 aa, Staphylococcus aureus
MFKFNEDEENLKCSFCGKDQDQVKKLVAGSGVYICNECIELCSEIVEEELAQNTSEAMTELPTPKEIMDHLNEYVIGQEKAKKSLAVAVYNHYKRIQQLGPKEDDVELQKSNIALIGPTGSGKTLLAQTLAKTLNVPFAIADATSLTEAGYVGDDVENILLRLIQAADFDIDKAEKGIIYVDEIDKIARKSENTSITRDVSGEGVQQALLKILEGTTASVPPQGGRKHPNQEMIQIDTTNILFILGGAFDGIEEVIKRRLGEKVIGFSSNEADKYDEQALLAQIRPEDLQAYGLIPEFIGRVPIVANLETLDVTALKNILTQPKNALVKQYTKMLELDDVDLEFTEEALSAISEKAIERKTGARGLRSIIEESLIDIMFDVPSNENVTKVVITAQTINEETEPELYDAEGNLINNSKTSA

SEQ ID NO: 692 - protein, 196 aa, Staphylococcus aureus
MKVNPNNIELIISAVKEEQYPETELSEVALSGRSNVGKSTFINSMIGRKNMARTSQQPGKTQTLNFYNIDEQLIFVDVPGYGYAKVSKTQREKFGKMIEEYITKRENLQLVIQLVDLRHDPTQDDILMYNYLKHFDIPTLVICTKEDKIPKGKVQKHIKNIKTQLDMDPDDTIVSYSSIQNNKQQQIWNLIEPYIS

SEQ ID NO: 693 - protein, 172 aa, Staphylococcus aureus
MAKDQTQINDKIRAKELRLIGQDGEQIGVKSKREALEMAERVDLDLVVVAPNAKPPVARIMDYGKFKFEQQKKEKEMKKKQKIINVKEIRLSPTIEEHDFQTKLKNGRKFLTKGDKCKVSIRFRGRAITHKEIGQRVLEKYADECKDIATVEQKPKMDGRQMFIMLAPTAEK

SEQ ID NO: 694 - protein, 118 aa, Staphylococcus aureus
MPRVKGGTVTRARRKKTIKLAKGYFGSKHTLYKVAKQQVMKSGQYAFRDRRQRKRDFRKLWITRINAAARQHEMSYSRLMNGLKKAGIDINRKMLSEIAISDEKAFAQLVTKAKDALK

SEQ ID NO: 695 - protein, 466 aa, Staphylococcus aureus
MGRQAFEFGLRPKDQFKVMQHFDLNTNHLEVLNRLYTPLIGTQAVGLYHFMTQFVKDSHNETLILSHYIFMNELKINLLEFRQQMDLLEAIGLLKAFVKHDEQETQFVYQLIQPPSAHLFFNDPMLSIFLYSEVEHRRFHELKKYFEYQQIDLSEFKQVTRQFTDVFKVPSTKIDIDTSDIPINEPYQGIDLSNESFDFEMLRQMLGKHFISQDIVTKDAKRLITQLATLYGLTADGMKHVILNSITSGQQLSFEEMRKQARSYYLMEHENQMPKLQVKSPATSSSTGKSSEVNPKPQSDEWFELLEQTSPIDMLASWSESEPTISQKTMVEELIEREKMSFGVINILLQFVMLKEDMKLPKAYILEIASNWKKKGIKTAKEAYNYAKKVNQPKNEGSSGNYQKRGSYYGQRNRISKEKTPKWLENRDKPSEEDSAKDNSVDDQQLEQDRQAFLDKLSKKWEEDSR

SEQ ID NO: 696 - protein, 306 aa, Staphylococcus aureus
MKQFKSIINTSQDFEKRIEKIKKEVINDPDVKQFLEAHRAELTNAMIDEDLNVLQEYKDQQKHYDGHKFADCPNFVKGHVPELYVDNNRIKIRYLQCPCKIKYDEERFEAELITSHHMQRDTLNAKLKDIYMNHRDRLDVAMAADDICTAITNGEQVKGLYLYGPFGTGKSFILGAIANQLKSKKVRSTIIYLPEFIRTLKGGFKDGSFEKKLHRVREANILMLDDIGAEEVTPWVRDEVIGPLLHYRMVHELPTFFSSNFDYSELEHHLAMTRDGEEKTKAARIIERVKSLSTPYFLSGENFRNN

SEQ ID NO: 697 - protein, 876 aa, Staphylococcus aureus
MNKLVLIDGNSLSFRAFYALPLLSNKAGIHTNAVYGFAMLLEKILKEEKPNHFLVAFDAGKTTFRHEKYSEYKGGRQKTPPELSEQFPYIRQLLDAYHIKRYELDNYEADDIIGTLSKEADKAGFQTIIITGDRDLTQLATDNVTIYYTKKGVTDVDHYTPDFIAEKYNGLTPNQIIDMKGLMGDTSDNIPGVAGVGEKTAIKLLNQFDTVEGVYEHLDEISGKKLKEKLQNSKEDALMSKELATINVDSPIEVKLEDTLMTHQDEQQEKIELFKKLEFKQLLSDIDQSASVEDAIEKTFEIETSFDNIDFTSLKEAAIHFELDGGNYLRNNILKFSLFTGEKHIVINADDINNYAELVSWLENPNTKKVVYDAKKTYVASHRLGIDIQNISFDIMLASYIIDPSRTISDVQSVVSLYGQSFVKDDVSIYGKGKKFKVPEDDVLNPYVASITDAIYFAKPNMDKQLEEYNQVELLADLELPLAKILSEMEEIGIFTDVHDLEEMEKEIQEKLDVLIRNIHDAAGEDFNINSPKQLGVVLFETLQLPVIKKTKTGYSTAVDVLEQLQGEHPIIDYILEYRQLSKLQSTYVEGLQKVISDDQRIHTRFNQTLAQTGRLSSVDPNLQNIPVRLEEGRKIRKAFKPTSKDSVILSADYSQIELRVLAHITQDESMKEAFINGDDIHTATAMKVFGVEADQVDSLMRRQAKAVNFGIVYGISDYGLSQSLGITRKKAKAFIDDYLASFPGVKQYMSDIVKDAKALGYVETLLHRRRYIPDITSRNFNLRGFAERTAMNTPIQGSAADIIKLAMVKFAQKMKETTYQAKLLLQVHDELIFEVPKSEVDSFSEFVEEIMENALQLDVPLKVDSSYGATWYDAK

SEQ ID NO: 698 - protein, 207 aa, Staphylococcus aureus
MPKVIGLTGGIASGKSTVSELLSVFGFKVVDADKAAREAVKKGSKGLAQVREVFGDEAIDENGEMNRRYMGDLVFNHPEKRLELNAIIHPIVRDIMEEEKQEYLKQGYNVIMDIPLLFENELENTVDEVWVVYTSESIQMDRLMQRNNLSLEDAKARVYSQISIDKKSRMADHVIDNLGDKLELKQNLERLLEEEGYIEKPNYGEED

SEQ ID NO: 699 - protein, 307 aa, Staphylococcus aureus
MNAAVRAVVRTAIYNEIEVYGVYHGYQGLLNDDIHKLELGSVGDTIQRGGTFLYSARCPEFKEQEVRKVAIENLRKRGIEGLVVIGGDGSYRGAQRISEECKEIQTIGIPGTIDNDINGTDFTIGFDTALNTIIGLVDKIRDTASSHARTFIIEAMGRDCGDLALWAGLSVGAETIVVPEVKTDIKEIADKIEQGIKRGKKHSIVLVAEGCMTAQDCQKELSQYINVDNRVSVLGHVQRGGSPTGADRVLASRLGGYAVDLLMQGETAKGVGIKNNKIVATSFDEIFDGKDHKFDYSLYELANKLSI

SEQ ID NO: 700 - protein, 585 aa, Staphylococcus aureus
MRKTKIVCTIGPASESEEMIEKLINAGMNVARLNFSHGSHEEHKGRIDTIRKVAKRLDKIVAILLDTKGPEIRTHNMKDGIIELERGNEVIVSMNEVEGTPEKFSVTYENLINDVQVGSYILLDDGLIELQVKDIDHAKKEVKCDILNSGELKNKKGVNLPGVRVSLPGITEKDAEDIRFGIKENVDFIAASFVRRPSDVLEIREILEEQKANISVFPKIENQEGIDNIAEILEVSDGLMVARGDMGVEIPPEKVPMVQKDLIRQCNKLGKPVITATQMLDSMQRNPRATRAEASDVANAIYDGTDAVMLSGETAAGLYPEEAVKTMRNIAVSAEAAQDYKKLLSDRTKLVETSLVNAIGISVAHTALNLNVKAIVAATESGSTARTISKYRPHSDIIAVTPSEETARQCSIVWGVQPVVKKGRKSTDALLNNAVATAVETGRVSNGDLIIITAGVPTGETGTTNMMKIHLVGDEIANGQGIGRGSVVGTTLVAETVKDLEGKDLSDKVIVTNSIDETFVPYVEKALGLITEENGITSPSAIVGLEKGIPTVVGVEKAVKNISNNMLVTIDAAQGKIFEGYANVL

SEQ ID NO: 701 - protein, 285 aa, Staphylococcus aureus
MFKDFFNRTKKKKYLTVQDSKNNDVPAGIMTKCPKCKKIMYTKELAENLNVCFNCDHHIALTAYKRIEAISDEGSFTEFDKGMTSANPLDFPSYLEKIEKDQQKTGLKEAVVTGTAQLDGMKFGVAVMDSRFRMGSMGSVIGEKICRIIDYCTENRLPFILFSASGGARMQEGIISLMQMGKTSVSLKRHSDAGLLYISYLTHPTTGGVSASFASVGDINLSEPKALIGFAGRRVIEQTINEKLPDDFQTAEFLLEHGQLDKVVHRNDMRQTLSEILKIHQEVTK

SEQ ID NO: 702 - protein, 314 aa, Staphylococcus aureus
MLDFEKPLFEIRNKIESLKESQDKNDVDLQEEIDMLEASLERETKKIYTNLKPWDRVQIARLQERPTTLDYIPYIFDSFMELHGDRNFRDDPAMIGGIGFLNGRAVTVIGQQRGKDTKDNIYRNFGMAHPEGYRKALRLMKQAEKFNRPIFTFIDTKGAYPGKAAEERGQSESIATNLIEMASLKVPVIAIVIGEGGSGGALGIGIANKVLMLENSTYSVISPEGAAALLWKDSNLAKIAAETMKITAHDIKQLGIIDDVISEPLGGAHKDVEQQALAIKSAFVAQLDSLESLSRDEIANDRFEKFRNIGSYIE

SEQ ID NO: 703 - protein, 607 aa, Staphylococcus aureus
MAHLSVKLRLLILALIDSLIVTFSVFVSYYILEPYFKTYSVKLLILAAISLFISHHISAFIFNMYHRAWEYASVSELILIVKAVTTSIVITMVVVTIVTGNRPFFRLYLITWMMHLILIGGSRLFWRIYRKYLGGKSFNKKPTLVVGAGQAGSMLIRQMLKSDEMKLEPVLAVDDDEHKRNITITEGVKVQGKIADIPELVRKYKIKKIIIAIPTIGQERLKEINNICHMDGVELLKMPNIEDVMSGELEVNQLKKVEVEDLLGRDPVELDMDMISNELTNKTILVTGAGGSIGSEICRQVCNFYPERIILLGHGENSIYLINRELRNRFGKNVDIVPIIADVQNRARMFEIMETYKPYAVYHAAAHKHVPLMEDNPEEAVHNNILGTKNTAEAAKNAEVKKFVMISTDKAVNPPNVMGASKRIAEMIIQSLNDETHRTNFVAVRFGNVLGSRGSVIPLFKSQIEEGGPVTVTHPEMTRYFMTIPEASRLVLQAGALAEGGEVFVLDMGEPVKIVDLARNLIKLSGKKEDDIRITYTGIRPGEKMFEELMNKDEVHPEQVFEKIYRGKVQHMKCNEVEAIIQDIVNDFSKEKIINYANGKKGDNYVR

SEQ ID NO: 704 - protein, 1065 aa, Staphylococcus aureus
MVAYLNIHTAYDLLNSSLKIEDAVRLAVSENVDALAITDTNVLYGFPKFYDACIANNIKPIFGMTIYVTNGLNTVETVVLAKNNDGLKDLYQLSSEIKMNSMENVSFELLQQFSSNLIIIFKNVADEHRDIVQVFDSHEDTYLDHQSVLVQGIKHVWIQNVCYQTRQDADTISALAAIRDNAKLDLIHDQEDFGAHFLTEKEIKQLDINQEYLTQVDVIAQKCNAELKYHQSLLPQYQTPNDESAKKYLWRVLVTQLKKLELNYDVYLERLKYEYKVITNMGFEDYFLIVSDLIHYAKTNDVMVGPGRGSSAGSLVSYLLGITTIDPIKFNLLFERFLNPERVTMPDIDIDFEDTRRERVIQYVQEKYGELHVSGIVTFGHLLARAVARDVGRIMGFDEVTLNEISSLIPHKLGITLDEAYQIDDFKKFVHRNHRHERWFSICKKLEGLPRHTSTHAAGIIINDHPLYEYAPLTKGDTGLLTQWTMTEAERIGLLKIDFLGLRNLSIIHQILIQVKKDLGINIDIEKIPFDDQKVFELLSQGDTTGIFQLESDGVRSVLKKLKPEHFEDIVAVTSLYRPGPMEEIPTYITRRHDPSKVQYLHPHLEPILKNTYGVIIYQEQIMQIASTFANFSYGEADILRRAMSKKNRAVLESERQHFIEGAKQNGYHEDISKQIFDLILKFADYGFPRAHAVSYSKIAYIMSFLKVHYPNYFYANILSNVIGSEKKTAQMIEEAKKQGITILPPNINESHWFYKPSQEGIYLSIGTIKGVGYQSVKVIVDERYQNGKFKDFFDFARRIPKRVKTRKLLEALILVGAFDAFGKTRSTLLQAIDQVLDGDLNIEQDGFLFDILTPKQMYEDKEELPDALISQYEKEYLGFYVSQHPVDKKFVAKQYLTIFKLSNAQNYKPILVQFDKVKQIRTKNGQNMAFVTLNDGIETLDGVIFPNQFKKYEELLSHNDLFIVSGKFDHRKQQRQLIINEIQTLATFEEQKLAFAKQIIIRNKSQIDMFEEMIKATKENANDVVLSFYDETIKQMTTLGYINQKDSMFNNFIQSFNPSDIRLI

SEQ ID NO: 705 - protein, 437 aa, Staphylococcus aureus
MTHYHFVGIKGSGMSSLAQIMHDLGHEVQGSDIENYVFTEVALRNKGIKILPFDANNIKEDMVVIQGNAFASSHEEIVRAHQLKLDVVSYNDFLGQIIDQYTSVAVTGAHGKTSTTGLLSHVMNGDKKTSFLIGDGTGMGLPESDYFAFEACEYRRHFLSYKPDYAIMTNIDFDHPDYFKDINDVFDAFQEMAHNVKKGIIAWGDDEHLRKIEADVPIYYYGFKDSDDIYAQNIQITDKGTAFDVYVDGEFYDHFLSPQYGDHTVLNALAVIAISYLEKLDVTNIKEALETFGGVKRRFNETTIANQVIVDDYAHHPREISATIETARKKYPHKEVVAVFQPHTFSRTQAFLNEFAESLSKADRVFLCEIFGSIRENTGALTIQDLIDKIEGASLINEDSINVLEQFDNAVVLFMGAGDIQKLQNAYLDKLGMKNAF

SEQ ID NO: 706 - protein, 553 aa, Staphylococcus aureus
MSESKEMVRGTFLITISILITKVLGVLFIIPFNYLIGGQENMAPFTYAYAPYNIAIAVATAGVPLAASKYVAKYNAIGAYKVSQKFYKSSFIVMSITGVLGFLVLYFLAPYISELTLARNIHDKNGWSVDDITWIIRIISMVVIFIPVLATWRGIFQGYKSMGPTAVSEVTEQIARVIFILIGSYLVLNVFDGSILLANGIATFAAAVGAIIGIFTLWYYWRKRKHNIDRMVESDYTDIDVSYGKMYKEIIAYSIPFVIVSLNYPLFNLVDQFTHNGALSLVGIPSQLQDIFFNMLNMSTNKIVMIPTSLSAGFAVSLIPYITKTFAEGRLHEMHHQIRTSIGVLMFITVPASIGIMALAQPLFTVFYGYDPIVLGHDPNHDGSRLLFYYAPVAILISLLSVTASMLQGIDKQKLTVYVILASVVIKLALNYPLIMLFHTPGAILSTSIALLFAIGCNFYILKKYAKFKFSYSWIHFAKIFLYSFIMMLGVELVFFLANLFLEPTKLGYLIIIILGVTVGILIYGTITIKTRLADEFLGEIPEKLRRRVRFLR

SEQ ID NO: 707 - protein, 231 aa, Staphylococcus aureus
MRIDKFLANMGVGTRNEVKQLLKKGLVNVNEQVIKSPKTHIEPENDKITVRGELIEYIENVYIMLNKPKGYISATEDHHSKTVIDLIPEYQHLNIFPVGRLDKDTEGLLLITNDGDFNHELMSPNKHVSKKYEVISANPITEDDIQAFKEGVTLTDGKVKPAILTYIDNQTSHVTIYEGKYHQVKRMFHSIQNEVLHLRRIKIADLELDSNLDSGEYRLLTENDFDKLNYK

SEQ ID NO: 708 - protein, 314 aa, Staphylococcus aureus
MAIECPVTNLEEAYMYQTIIIGGGPSGLMAAVAASEQSSSVLLIEKKKGLGRKLKISGGGRCNVTNRLPYAEIIKNIPGNGKFLYSPFSIFDNESIIDFFESRGVKLKEEDHGRMFPVSNKAQDVVDTLVTTIERQHVTIKEEEAVSRIEVNTDQTFTVHTQNNSYESHSLVIATGGTSVPQTGSTGDGYKFAQDLGHTITELFPTEVPITSAEPFIKSNRLKGLSLKDVELSVLKKNGKKRISHQMDMLFTHFGISGPAALRCSQFVYKEQKNQKTQHISMAIDAFPELNHEQLKQHITSLIKSTIERLSKYV

SEQ ID NO: 709 - protein, 804 aa, Staphylococcus aureus
MNYNHNQIEKKWQDYWDENKTFKTNDNLGQKKFYALDMFPYPSGAGLHVGHPEGYTATDIISRYKRMQGYNVLHPMGWDAFGLPAEQYALDTGNDPREFTKKNIQTFKRQIKELGFSYDWDREVNTTDPEYYKWTQWIFIQLYNKGLAYVDEVAVNWCPALGTVLSNEEVIDGVSERGGHPVYRKPMKQWVLKITEYADQLLADLDDLDWPESLKDMQRNWIGRSEGAKVSFDVDNTEGKVEVFTTRPDTIYGASFLVLSPEHALVNSITTDEYKEKVKAYQTEASKKSDLERTDLAKDKSGVFTGAYAINPLSGEKVQIWIADYVLSTYGTGAIMAVPAHDDRDYEFAKKFDLPIIEVIEGGNVEEAAYTGEGKHINSGELDGLENEAAITKAIQLLEQKGAGEKKVNYKLRDWLFSRQRYWGEPIPVIHWEDGTMTTVPEEELPLLLPETDEIKPSGTGESPLANIDSFVNVVDEKTGMKGRRETNTMPQWAGSCWYYLRYIDPKNENMLADPEKLKHWLPVDLYIGGVEHAVLHLLYARFWHKVLYDLGIVPTKEPFQKLFNQGMILGEGNEKMSKSKGNVINPDDIVQSHGADTLRLYEMFMGPLDAAIAWSEKGLDGSRRFLDRVWRLMVNEDGTLSSKIVTTNNKSLDKVYNQTVKKVTEDFETLGFNTAISQLMVFINECYKVDEVYKPYIEGFVKMLAPIAPHIGEELWSKLGHEESITYQPWPTYDEALLVDDEVEIVVQVNGKLRAKIKIAKDTSKEEMQEIALSNDNVKASIEGKDIMKVIAVPQKLVNIVAK

SEQ ID NO: 710 - protein, 437 aa, Staphylococcus aureus
MRQWTAIHLAKLARKASRAVGKRGTDLPGQIARKVDTDVLRKLAEQVDDIVFISGTNGKTTTSNLIGHTLKANNIQIIHNNEGANMAAGITSAFIMQSTPKTKIAVIEIDEGSIPRVLKEVTPSMMVFTNFFRDQMDRFGEIDIMVNNIAETISNKGIKLLLNADDPFVSRLKIASDTIVYYGMKAHAHEFEQSTMNESRYCPNCGRLLQYDYIHYNQIGHYHCQCGFKREQAKYEISSFDVAPFLYLNINDEKYDMKIAGDFNAYNALAAYTVLRELGLNEQTIKNGFETYTSDNGRMQYFKKERKEAMINLAKNPAGMNASLSVGEQLEGEKVYVISLNDNAADGRDTSWIYDADFEKLSKQQIEAIIVTGTRAEELQLRLKLAEVEVPIIVERDIYKATAKTMDYKGFTVAIPNYTSLAPMLEQLNRSFEGGQS

SEQ ID NO: 711 - protein, 243 aa, Staphylococcus aureus
MHELTIYHFMSDKLNLYSDIGNIIALRQRAKKRNIKVNVVEINETEGITFDECDIFFIGGGSDREQALATKELSKIKTPLKEAIEDGMPGLTICGGYQFLGKKYITPDGTELEGLGILDFYTESKTNRLTGDIVIESDTFGTIVGFENHGGRTYHDFGTLGHVTFGYGNNDEDKKEGIHYKNLLGTYLHGPILPKNYEITDYLLEKACERKGIPFEPKEIDNEAEIQAKQVLIDRANRQKKSR

SEQ ID NO: 712 - protein, 315 aa, Staphylococcus aureus
MRKRARIIYNPTSGKELFKRELPDALIKLEKAGYETSAYATEKIGDATLEAERAMHENYDVLIAAGGDGTLNEVVNGIAEKPNRPKLGVIPMGTVNDFGRALHIPNDIMGALDVIIEGHSTKVDIGKMNNRYFINLAAGGQLTQVSYETPSKLKSIVGPFAYYIKGFEMLPQMKAVDLRIEYDGNVFQGEALLFFLGLTNSMAGFEKLVPDAKLDDGYFTLIIVEKSNLAELGHIMTLASRGEHTKHPKVIYEKAKAINISSFTDLQLNVDGEYGGKLPANFLNLERHIDVFAPNDIVNEELINNDHVDDNLIEE

SEQ ID NO: 713 - protein, 100 aa, Staphylococcus aureus
MTKVTREEVEHIANLARLQISPEETEEMANTLESILDFAKQNDSADTEGVEPTYHVLDLQNVLREDKAIKGIPQELALKNAKETEDGQFKVPTIMNEEDA

SEQ ID NO: 714 - protein, 485 aa, Staphylococcus aureus
MSIRYESVENLLTLIKDKKIKPSDVVKDIYDAIEETDPTIKSFLALDKENAIKKAQELDELQAKDQMDGKLFGIPMGIKDNIITNGLETTCASKMLEGFVPIYESTVMEKLHKENAVLIGKLNMDEFAMGGSTETSYFKKTVNPFDHKAVPGGSSGGSAAAVAAGLVPLSLGSDTGGSIRQPAAYCGVVGMKPTYGRVSRFGLVAFASSLDQIGPLTRNVKDNAIVLEAISGADVNDSTSAPVDDVDFTSEIGKDIKGLKVALPKEYLGEGVADDVKEAVQNAVETLKSLGAVVEEVSLPNTKFGIPSYYVIASSEASSNLSRFDGIRYGYHSKEAHSLEELYKMSRSEGFGKEVKRRIFLGTFALSSGYYDAYYKKSQKVRTLIKNDFDKVFENYDVVVGPTAPTTAFNLGEEIDDPLTMYANDLLTTPVNLAGLPGISVPCGQSNGRPIGLQFIGKPFDEKTLYRVAYQYETQYNLHDVYEKL

SEQ ID NO: 715 - protein, 475 aa, Staphylococcus aureus
MHFETVIGLEVHVELKTDSKMFSPSPAHFGAEPNSNTNVIDLAYPGVLPVVNKRAVDWAMRAAMALNMEIATESKFDRKNYFYPDNPKAYQISQFDQPIGENGYIDIEVDGETKRIGITRLHMEEDAGKSTHKGEYSLVDLNRQGTPLIEIVSEPDIRSPKEAYAYLEKLRSIIQYTGVSDVKMEEGSLRCDANISLRPYGQEKFGTKAELKNLNSFNYVRKGLEYEEKRQEEELLNGGEIGQETRRFDESTGKTILMRVKEGSDDYRYFPEPDIVPLYIDDAWKERVRQTIPELPDERKAKYVNELGLPAYDAHVLTLTKEMSDFFESTIEHGADVKLTSNWLMGGVNEYLNKNQVELLDTKLTPENLAGMIKLIEDGTMSSKIAKKVFPELAAKGGNAKQIMEDNGLVQISDEATLLKFVNEALDNNEQSVEDYKNGKGKAMGFLVGQIMKASKGQANPQLVNQLLKQELDKR

SEQ ID NO: 716 - protein, 667 aa, Staphylococcus aureus
MADLSSRVNELHDLLNQYSYEYYVEDNPSVPDSEYDKLLHELIKIEEEHPEYKTVDSPTVRVGGEAQASFKKVNHDTPMLSLGNAFNEDDLRKFDQRIREQIGNVEYMCELKIDGLAVSLKYVDGYFVQGLTRGDGTTGEDITENLKTIHAIPLKMKEPLNVEVRGEAYMPRRSFLRLNEEKEKNDEQLFANPRNAAAGSLRQLDSKLTAKRKLSVFIYSVNDFTDFNARSQSEALDELDKLGFTTNKNRARVNNIDGVLEYIEKWTSQRESLPYDIDGIVIKVNDLDQQDEMGFTQKSPRWAIAYKFPAEEVVTKLLDIELSIGRTGVVTPTAILEPVKVAGTTVSRASLHNEDLIHDRDIRIGDSVVVKKAGDIIPEVVRSIPERRPEDAVTYHMPTHCPSCGHELVRIEGEVALRCINPKCQAQLVEGLIHFVSRQAMNIDGLGTKIIQQLYQSELIKDVADIFYLTEEDLLPLDRMGQKKVDNLLAAIQQAKDNSLENLLFGLGIRHLGVKASQVLAEKYETIDRLLTVTEAELVEIHDIGDKVAQSVVTYLENEDIRALIQKLKDKHVNMIYKGIKTSDIEGHPEFSGKTIVLTGKLHQMTRNEASKWLASQGAKVTSSVTKNTDVVIAGEDAGSKLTKAQSLGIEIWTEQQFVDKQNELNS

SEQ ID NO: 717 - protein, 489 aa, Staphylococcus aureus
MYQLEDDSLMLHNDLYQINMAESYWNDNIHEKMAVFDLYFRKMPFNSGYAVFNGLKRVIDFIEHFGFSESDLEYLKSIGYKDDFLSYLKDLKFTGSIRSMQEGELCFGNEPLLRVEAPLIQAQLIETILLNIVNFHTLITTKASRIRQIASNDKLMEFGTRRAQEIDAALWGARAAYIGGFDSTSNVRAGKLFGIPVSGTHAHAFVQTYGDEYVAFKKYAERHKNCVFLVDTFHTLKSGVPNAIKVAKELGDKINFVGIRLDSGDIAYLSKEARRMLDEAGFTETKIIASNDLDEETITSLKAQGAKVDSWGVGTKLITGYDQPALGAVYKLVAIENEEGSYSDRIKLSNNAEKVTTPGKKNVYRIINKKTGKAEGDYITLENENPYDEQPLKLFHPVHTYKMKFIKSFEAIDLHHNIYENGKLVYQMPTEDESREYLAQGLQSIWDENKRFLNPQEYPVDLSKACWDNKHKRIFEVAEHVKEMEEDNE

SEQ ID NO: 718 - protein, 273 aa, Staphylococcus aureus
MSKLQDVIVQEMKVKKRIDSAEEIMELKQFIKNYVQSHSFIKSLVLGISGGQDSTLVGKLVQMSVNELREEGIDCTFIAVKLPYGVQKDADEVDQALRFIEPDEIVTVNIKPAVDQSVQSLKEAGIVLTDFQKGNEKARERMKVQFSIASNRQGIVVGTDHSAENITGFYTKYGDGAADIAPIFGLNKRQGRQLLAYLGAPKELYEKTPTADLEDDKPQLPDEDALGVTYEAIDNYLEGKPVTPEEQKVIENHYIRNAHKRELAYTRYTWPKS

SEQ ID NO: 719 - protein, 309 aa, Staphylococcus aureus
MAKTYIFGHKNPDTDAISSAIIMAEFEQLRGNSGAKAYRLGDVSAETQFALDTFNVPAPELLTDDLDGQDVILVDHNEFQQSSDTIASATIKHVIDHHRIANFETAGPLCYRAEPVGCTATILYKMFRERGFEIKPEIAGLMLSAIISDSLLFKSPTCTQQDVKAAEELKDIAKVDIQKYGLDMLKAGASTTDKSVEFLLNMDAKSFTMGDYVTRIAQVNAVDLDEVLNRKEDLEKEMLAVSAQEKYDLFVLVVTDIINSDSKILVVGAEKDKVGEAFNVQLEDDMAFLSGVVSRKKQIVPQITEALTK

SEQ ID NO: 720 - protein, 94 aa, Staphylococcus aureus
MLKPIGNRVIIEKKEQEQTTKSGIVLTDSAKEKSNEGVIVAVGTGRLLNDGTRVTPEVKEGDRVVFQQYAGTEVKRDNETYLVLNEEDILAVIE

SEQ ID NO: 721 - protein, 538 aa, Staphylococcus aureus
MVKQLKFSEDARQAMLRGVDQLANAVKVTIGPKGRNVVLDKEFTAPLITNDGVTIAKEIELEDPYENMGAKLVQEVANKTNEIAGDGTTTATVLAQAMIQEGLKNVTSGANPVGLRQGIDKAVKVAVEALHENSQKVENKNEIAQVGAISAADEEIGRYISEAMEKVGNDGVITIEESNGLNTELEVVEGMQFDRGYQSPYMVTDSDKMVAELERPYILVTDKKISSFQDILPLLEQVVQSNRPILIVADEVEGDALTNIVLNRMRGTFTAVAVKAPGFGDRRKAMLEDLAILTGAQVITDDLGLDLKDASIDMLGTASKVEVTKDNTTVVDGDGDENSIDARVSQLKSQIEETESDFDREKLQERLAKLAGGVAVIKVGAASETELKERKLRIEDALNSTRAAVEEGIVAGGGTALVNVYQKVSEIEAEGDIETGVNIVLKALTAPVRQIAENAGLEGSVIVERLKNAEPGVGFNAATNEWVNMLEAGIVDPTKVTRSALQHAASVAAMFLTTEAVVASIPEKNNDQPNMGGMPGMM

SEQ ID NO: 722 - protein, 119 aa, Staphylococcus aureus
MIHGIGVDLIEIDRIKVLYSKQPKLVERILTKNEQHKFNNFTHEQRKIEFLAGRFATKEAFSKALGTGLGKHVAFNDIDCYNDELGKPKIDYEGFIVHVSISHTEHYAMSQVVLEKSAF

SEQ ID NO: 723 - protein, 382 aa, Staphylococcus aureus
MSDKYYRSAYMNVDLNAVASNFKVFSTLHPNKTVMAVVKANAYGLGSVKVARHLMENGATFFAVATLDEAIELRMHGITAKILVLGVLPAKDIDKAIQHRVALTVPSKQWLKEAIKNISGEQEKKLWLHIKLDTGMGRLGIKDTNTYQEVIEIIQQYEQLVFEGVFTHFACADEPGDMTTEQYQRFKDMVNEAIKPEYIHCQNSAGSLLMDCQFCNAIRPGISLYGYYPSEYVQQKVKVHLKPSVQLIANVVQTKTLQAGESVSYGATYTATDPTTIALLPIGYADGYLRIMQGSFVNVNGHQCEVIGRVCMDQTIVKVPDQVKAGDSVILIDNHRESPQSVEVVAEKQHTINYEVLCNLSRRLPRIYHDGDQRFVTNELLK

SEQ ID NO: 724 - protein, 356 aa, Staphylococcus aureus
MTKENICIVFGGKSAEHEVSILTAQNVLNAIDKDKYHVDIIYITNDGDWRKQNNITAEIKSTDELHLENGEALEISQLLKESSSGQPYDAVFPLLHGPNGEDGTIQGLFEVLDVPYVGNGVLSAASSMDKLVMKQLFEHRGLPQLPYISFLRSEYEKYEHNILKLVNDKLNYPVFVKPANLGSSVGISKCNNEAELKEGIKEAFQFDRKLVIEQGVNAREIEVAVLGNDYPEATWPGEVVKDVAFYDYKSKYKDGKVQLQIPADLDEDVQLTLRNMALEAFKATDCSGLVRADFFVTEDNQIYINETNAMPGFTAFSMYPKLWENMGLSYPELITKLIELAKERHQDKQKNKYKID

SEQ ID NO: 725 - protein, 452 aa, Staphylococcus aureus
MINVTLKQIQSWIPCEIEDQFLNQEINGVTIDSRAISKNMLFIPFKGENVDGHRFVSKALQDGAGAAFYQRGTPIDENVSGPIIWVEDTLTALQQLAQAYLRHVNPKVIAVTGSNGKTTTKDMIESVLHTEFKVKKTQGNYNNEIGLPLTILELDNDTEISILEMGMSGFHEIEFLSNLAQPDIAVITNIGESHMQDLGSREGIAKAKSEITIGLKDNGTFIYDGDEPLLKPHVKEVENAKCISIGVATDNALVCSVDDRDTTGISFTINNKEHYDLPILGKHNMKNATIAIAVGHELGLTYNTIYQNLKNVSLTGMRMEQHTLENDITVINDAYNASPTSMRAAIDTLGTLTGRRILILGDVLELGENSKEMHIGVGNYLEEKHIDVLYTFGNEAKYIYDSGQQHVEKAQHFNSKDDMIEVLTSDLKAHDRVLVKGSRGMKLEEVVNALIS

SEQ ID NO: 726 - protein, 290 aa, Staphylococcus aureus
MKKKALLPLFLGIMVFLAGCDYSKPEKRSGFFYNTFVDPMKNVLDWLGNNLLNDNYGLAIIILVLVIRIILLPFMLSNYKNSHMMRQKMKVAKPEVEKIQEKVKRARTQEEKMAANQELMQVYKKYDMNPIKSMLGCLPMLIQLPIIMGLYFVLKDQLVDGLFKYPHFLWFDLGRPDIWITIIAGVLYFIQAYVSSKTMPDEQRQMGYMMMVISPIMIIWISLSSASALGLYWSVSAAFLVVQTHFANIYYEKVAKKEVQPFIEAYEREHNGGSNKKGKNTQVVSKKKKK

SEQ ID NO: 727 - protein, 383 aa, Staphylococcus aureus
MGKCKVIGVLSGGFTMDKIVIKGGNKLTGEVKVEGAKNAVLPILTASLLASDKPSKLVNVPALSDVETINNVLTTLNADVTYKKDENAVVVDATKTLNEEAPYEYVSKMRASILVMGPLLARLGHAIVALPGGCAIGSRPIEQHIKGFEALGAEIHLENGNIYANAKDGLKGTSIHLDFPSVGATQNIIMAASLAKGKTLIENAAKEPEIVDLANYINEMGGRITGAGTDTITINGVESLHGVEHAIIPDRIEAGTLLIAGAITRGDIFVRGAIKEHMASLVYKLEEMGVELDYQEDGIRVRAEGELQPVDIKTLPHPGFPTDMQSQMMALLLTANGHKVVTETVFENRFMHVAEFKRMNANINVEGRSAKLEGKSHIARCTS

SEQ ID NO: 728 - protein, 146 aa, Staphylococcus aureus
METIFDYNQIKQIIPHRQPFLLIDKVVEYEEGQRCVAIKQVSGNEPFFQGHFPEYAVMPGVLITEALAQTGAVAILNSEENKGKIALFAGIDKCRFKRQVVPGDTLTLEVEITKIKGPIGKGNAKATVDGQLACSCELTFAIQDVK

SEQ ID NO: 729 - protein, 242 aa, Staphylococcus aureus
MDHKSPLVSWNLFGFDIVFNLSSILMILVTAFLVFLLAIICTRNLKKRPTGKQNFVEWIFDFVRGIIEGNMAWKKGGQFHFLAVTLILYIFIANMLGLPFSIVTKDHTLWWKSPTADATVTLTLSTTIILLTHFYGIKMRGTKQYLKGYVQPFWPLAIINVFEEFTSTLTLGLRLYGNIFAGEILLTLLAGLFFNEPAWGWIISIPGLIVWQAFSIFVGTIQAYIFIMLSMVYMSHKVADEH

SEQ ID NO: 730 - protein, 173 aa, Staphylococcus aureus
MTETANLFVLGAAGGVEWGTVIVQVLTFIVLLALLKKFAWGPLKDVMDKRERDINRDIDDAEQAKLNAQKLEEENKQKLKETQEEVQKILEDAKVQARQQQEQIIHEANVRANGMIETAQSEINSQKERAIADINNQVSELSVLIASKVLRKEISEQDQKALVDKYLKEAGDK

SEQ ID NO: 731 - protein, 179 aa, Staphylococcus aureus
MVKVANKYAKALFDVSLDTNNLETINEELTVINEAVKDKIEQLKMVDSNPTQTAEQRRELINGVFTDINPYIKNMMYVLADNRHISLIADVFKAFQSLYNGHYNQDFATIESTYELSQEELDKIVKLVTQQTKLSKVIVDTKINPDLIGGFRVKVGTTVLDGSVRNDLVQLQRKFRRVN

SEQ ID NO: 732 - protein, 502 aa, Staphylococcus aureus
MAIKAEEISALLRSQIENYESEMSVTDVGTVLQIGDGIALIHGLNDVMAGELVEFHNGVLGLAQNLEESNVGVVILGPYTGITEGDEVKRTGRIMEVPVGEELIGRVVNPLGQPIDGQGPINTTKTRPVEKKATGVMDRKSVDEPLQTGIKAIDALVPIGRGQRELIIGDRQTGKTTIAIDTILNQKDQGTICIYVAIGQKDSTVRANVEKLRQAGALDYTIVVAASASEPSPLLYIAPYSGVTMGEEFMFNGKHVLIVYDDLTKQAAAYRELSLLLRRPPGREAYPGDVFYLHSRLLERAAKLNDDLGGGSITALPIIETQAGDISAYVPTNVISITDGQIFLQSDLFFSGVRPAINAGQSVSRVGGSAQIKAMKKVAGTLRLDLASYRELESFAQFGSDLDEFTASKLERGKRTVEVLKQDQNKPLPVEHQVLIIYALTKGYLDDIPVVDITRFEDELNHWAESNATELLNEIRETGGLPDAEKFDTAINEFKKSFSKSE

SEQ ID NO: 733 - protein, 288 aa, Staphylococcus aureus
MASLKEIDTRIKSTKKMKQITKAMNMVSSSKLRRAEKNTKQFTPYMDKMQDAITAVAGASSNTNHPMLRPRKITRSGYLVITSDKGLAGAYSANVLKKLITDIEAKHQDSSEYSIVVLGQQGVDFLKNRGYDIEYSQVDVPDQPSFKSVQALANHAIDLYSEEEIDELNIYYSHYVSVLENKPTSRQVLPLSQEDSSKGHGHLSSYEFEPDKESILSVILPQYVESLIYGTILDAKASEHATRMTAMKNATDNATELIDDLSLEYNRARQAEITQQITEIVGGSAALE

SEQ ID NO: 734 - protein, 470 aa, Staphylococcus aureus
MGIGRVTQVMGPVIDVRFEHNEVPKINNALVIDVPKEEGTIQLTLEVALQLGDDVVRTIAMDSTDGVQRGMDVKDTGKEISVPVGDETLGRVFNVLGETIDLKEEISDSVRRDPIHRQAPAFDELSTEVQILETGIKVVDLLAPYIKGGKIGLFGGAGVGKTVLIQELINNIAQEHGGISVFAGVGERTREGNDLYFEMSDSGVIKKTAMVFGQMNEPPGARMRVALSGLTMAEYFRDEQGQDVLLFIDNIFRFTQAGSEVSALLGRMPSAVGYQPTLATEMGQLQERITSTTKGSVTSIQAVFVPADDYTDPAPATAFAHLDATTNLERKLTEMGIYPAVDPLASTSRALEPSIVGQEHYEVARDVQSTLQKYRELQDIIAILGMDELSDEDKQTVERARRIQFFLSQNFHVAEQFTGQKGSYVPVKTTVANFKDILDGKYDHIPEDAFRLVGSMDDVIAKAKDMGVEV

SEQ ID NO: 735 - protein, 134 aa, Staphylococcus aureus
MNTLNLDIVTPNGSVYNRDNVELVVMQTTAGEIGVMSGHIPTVAALKTGFVKVKFHDGTEYIAVSDGFVEVRKDKVSIIVQTAETAREIDVERAKLAKARAESHLENDDDNTDIHRAERALERANNRLRVAELK

SEQ ID NO: 736 - protein, 209 aa, Staphylococcus aureus
MSKVHVFDHPLIQHKLSYIRDVNTGTKEFRELVDEVGMLMAYEVTRDLELQDVDIETPVTKMTAKRLAGKKLAIVPILRAGLGMTDGILSLVPAARVGHIGLYRDPETLKAVEYFAKLPQDITERQIIVVDPMLATGASAIEAITSLKKRGAKNIRFMCLIAAPEGVEKMHEAHPDVDIYIAALDEKLNDKAYITPGLGDAGDRLFGTK

SEQ ID NO: 737 - protein, 358 aa, Staphylococcus aureus
MFDQLDIVEERYEQLNELLSDPDVVNDSDKLRKYSKEQADLQKTVDVYRNYKAKKEELADIEEMLSETDDKEEVEMLKEESNGIKAELPNLEEELKILLIPKDPNDDKDVIVEIRAAAGGDEAAIFAGDLMRMYSKYAESQGFKTEIVEASESDHGGYKEISFSVSGNGAYSKLKFENGAHRVQRVPETESGGRIHTSTATVAVLPEVEDVEIEIRNEDLKIDTYRSSGAGGQHVNTTDSAVRITHLPTGVIATSSEKSQIQNREKAMKVLKARLYDMKVQEEQQKYASQRKSAVGTGDRSERIRTYNYPQSRVTDHRIGLTLQKLGQIMEGHLEEIIDALTLSEQTDKLKELNNGEL

SEQ ID NO: 738 - protein, 419 aa, Staphylococcus aureus
MAQEVIKIRGGRTLNGEVNISGAKNSAVAIIPATLLAQGHVKLEGLPQISDVKTLVSLLEDLNIKASLNGTELEVDTTEIQNAALPNNKVESLRASYYMMGAMLGRFKKCVIGLPGGCPLGPRPIDQHIKGFKALGAEIDESSTTSMKIEAKELKGAHIFLDMVSVGATINIMLAAVYATGQTVIENAAKEPEVVDVANFLTSMGANIKGAGTSTIKINGVKELHGSEYQVIPDRIEAGTYMCIAAACGENVILNNIVPKHVETLTAKFSELGVNVDVRDERIRINNNAPYQFVDIKTLVYPGFATDLQQPITPLLFMANGPSFVTDTIYPERFKHVEELKRMGANIEVDEGTATIKPSTLHGAEVYASDLRAGACLIIAGLIAEGVTTIYNVKHIYRGYTDIVEHLKALGADIWTETV

SEQ ID NO: 739 - protein, 269 aa, Staphylococcus aureus
MDFSNFFQNLSTLKIVTSILDLLIVWYVLYLLITVFKGTKAIQLLKGILVIVIGQQISMILNLTATSKLFDIVIQWGVLALIVIFQPEIRRALEQLGRGSFLKRYTSNTYSKDEEKLIQSVSKAVQYMAKRRIGALIVFEKETGLQDYIETGIAMDSNISQELLINVFIPNTPLHDGAMIIQGTKIAAAASYLPLSDSPKISKSLGTRHRAAVGISEVSDAFTVIVSEETGDISVTFDGKLRRDISNEIFEELLAEHWFGTRFQKKGVK

SEQ ID NO: 740 - protein, 451 aa, Staphylococcus aureus
MGKYFGTDGVRGVANQELTPELAFKLGRYGGYVLAHNKGEKHPRVLVGRDTRVSGEMLESALIAGLISIGAEVMRLGIISTPGVAYLTRDMGAELGVMISASHNPVADNGIKFFGSDGFKLSDEQENEIEALLDQENPELPRPVGNDIVHYSDYFEGAQKYLSYLKSTVDVNFEGLKIVLDGANGSTSSLAPFLFGDLEADTETIGCSPDGYNINEKCGSTHPEKLAEKVVETESDFGLAFDGDGDRIIAVDENGQIVDGDQIMFIIGQEMHKNQELNNDMIVSTVMSNLGFYKALEQEGIKSNKTKVGDRYVVEEMRRGNYNLGGEQSGHIVMMDYNTTGDGLLTGIQLASVIKMTGKSLSELAGQMKKYPQSLINVRVTDKYRVEENVDVKEVMTKVEVEMNGEGRILVRPSGTEPLVRVMVEAATDEDAERFAQQIADVVQDKMGLDK

SEQ ID NO: 741 - protein, 269 aa, Staphylococcus aureus
MEDKNSVIVFKNVSFQYQSDASFTLKDVSFNIPKGQWTSIVGHNGSGKSTIAKLMIGIEKVKSGEIFYNNQAITDDNFEKLRKDIGIVFQNPDNQFVGSIVKYDVAFGLENHAVPHDEMHRRVSEALKQVDMLERADYEPNALSGGQKQRVAIASVLALNPSVIILDEATSMLDPDARQNLLDLVRKVKSEHNITIISITHDLSEAMEADHVIVMNKGTVYKEGTATEIFDHAEELTRIGLDLPFPIKINQMLGHQTSFLTYEGLVDQL

SEQ ID NO: 742 - protein, 286 aa, Staphylococcus aureus
MTIRFDNVSYTYQKGTPYQHQAIHDVNTEFEQGKYYAIVGQTGSGKSTLIQNINALLKPTTGTVTVDDITITHKTKDKYIRPVRKRIGMVFQFPESQLFEDTVEREMIFGPKNFKMNLDEAKNYAHRLLMDLGFSRDVMSQSPFQMSGGQMRKIAIVSILAMNPDIIVVDEPTAGLDPQSKRQVMRLLKSLQTDENKAIILISHDMNEVARYADEVIVMKEGSIVSQTSPKELFKDKKKLADWHIGLPEIVQLQYDFEQKYQTKLKDIALTEEAFVSLYKEWQHEK

SEQ ID NO: 743 - protein, 145 aa, Staphylococcus aureus
MRQTFMANESNIERKWYVIDAEGQTLGRLSSEVASILRGKNKVTYTPHVDTGDYVIVINASKIEFTGNKETDKVYYRHSNHPGGIKSITAGELRRTNPERLIENSIKGMLPSTRLGEKQGKKLFVYGGAEHPHAAQQPENYELRG

SEQ ID NO: 744 - protein, 102 aa, Staphylococcus aureus
MAKQKIRIRLKAYDHRVIDQSAEKIVETAKRSGADVSGPIPLPTEKSVYTIIRAVHMYKDSREQFEQRTHKRLIDIVNPTPKTVDALMGLNLPSGVDIEIKL

SEQ ID NO: 745 - protein, 220 aa, Staphylococcus aureus
MTKGILGRKIGMTQVFGENGELIPVTVVEAKENVVLQKKTVEVDGYNAIQVGFEDKKAYKKDAKSNKYANKPAEGHAKKADAAPKRFIREFRNVDVDAYEVGQEVSVDTFVAGDVIDVTGVSKGKGFQGAIKRHGQSRGPMSHGSHFHRAPGSVGMASDASRVFKGQKMPGRMGGNTVTVQNLEVVQVDTENKVILVKGNVPGPKKGLVEIRTSIKKGNK

SEQ ID NO: 746 - protein, 207 aa, Staphylococcus aureus
MANYDVLKLDGTKSGSIELSDAVFGIEPNNSVLFEAINLQRASLRQGTHAVKNRSAVSGGGRKPWKQKGTGRARQGTIRAPQWRGGGIVFGPTPRSYAYKMPKKMRRLALRSALSFKAQENGLTVVDAFNFEAPKTKEFKNVLSTLEQPKKVLVVTENEDVNVELSARNIPGVQVTTAQGLNVLDITNADSLVITEAAAKKVEEVLG

SEQ ID NO: 747 - protein, 91 aa, Staphylococcus aureus
MEARDILKRPVITEKSSEAMAEDKYTFDVDTRVNKTQVKMAVEEIFNVKVASVNIMNYKPKKKRMGRYQGYTNKRRKAIVTLKEGSIDLFN

SEQ ID NO: 748 - protein, 277 aa, Staphylococcus aureus
MAIKKYKPITNGRRNMTSLDFAEITKTTPEKSLLKPLPKKAGRNNQGKLTVRHHGGGHKRQYRVIDFKRNKDGINAKVDSIQYDPNRSANIALVVYADGEKRYIIAPKGLEVGQIVESGAEADIKVGNALPLQNIPVGTVVHNIELKPGKGGQIARSAGASAQVLGKEGKYVLIRLRSGEVRMILSTCRATIGQVGNLQHELVNVGKAGRSRWKGIRPTVRGSVMNPNDHPHGGGEGRAPIGRPSPMSPWGKPTLGKKTRRGKKSSDKLIVRGRKKK

SEQ ID NO: 749 - protein, 92 aa, Staphylococcus aureus
MARSIKKGPFVDEHLMKKVEAQEGSEKKQVIKTWSRRSTIFPNFIGHTFAVYDGRKHVPVYVTEDMVGHKLGEFAPTRTFKGHVADDKKTRR

SEQ ID NO: 750 - protein, 117 aa, Staphylococcus aureus
MEAKAVARTIRIAPRKVRLVLDLIRGKNAAEAIAILKLTNKASSPVIEKVLMSALANAEHNYDMNTDELVVKEAYANEGPTLKRFRPRAQGRASAINKRTSHITIVVSDGKEEAKEA

SEQ ID NO: 751 - protein, 217 aa, Staphylococcus aureus
MGQKINPIGLRVGIIRDWEAKWYAEKDFASLLHEDLKIRKFIDNELKEASVSHVEIERAANRINIAIHTGKPGMVIGKGGSEIEKLRNKLNALTDKKVHINVIEIKKVDLDARLVAENIARQLENRASFRRVQKQAITRAMKLGAKGIKTQVSGRLGGADIARAEQYSEGTVPLHTLRADIDYAHAEADTTYGKLGVKVWIYRGEVLPTKNTSGGGK

SEQ ID NO: 752 - protein, 144 aa, Staphylococcus aureus
MLLPKRVKYRRQHRPKTTGRSKGGNYVTFGEFGLQATTTSWITSRQIESARIAMTRYMKRGGKVWIKIFPHTPYTKKPLEVRMGAGKGAVEGWIAVVKPGRILFEVAGVSEEVAREALRLASHKLPVKTKFVKREELGGETNES

SEQ ID NO: 753 - protein, 87 aa, Staphylococcus aureus
MSERNDRKVYVGKVVSDKMDKTITVLVETYKTHKLYGKRVKYSKKYKTHDENNSAKLGDIVKIQETRPLSATKRFRIVEIVEESVII

SEQ ID NO: 754 - protein, 122 aa, Staphylococcus aureus
MIQQETRLKVADNSGAREVLTIKVLGGSGRKTANIGDVIVCTVKNATPGGVVKKGDVVKAVIVRTKSGVRRNDGSYIKFDENACVIIRDDKGPRGTRIFGPVARELREGNFMKIVSLAPEVL

SEQ ID NO: 755 - protein, 105 aa, Staphylococcus aureus
MHIKKGDNVKVIAGKDKGKEGKVIATLPKKDRVVVEGVNIMKKHQKPTQLNPEGGILETEAAIHVSNVQLLDPKTNEPTRVGYKFVDGKKVRIAKKSGEEIKSNN

SEQ ID NO: 756 - protein, 179 aa, Staphylococcus aureus
MNRLKEKFNTEVTENLMKKFNYSSVMEVPKIDKIVVNMGVGDAVQNSKVLDNAVEELELITGQKPLVTKAKKSIATFRLREGMPIGAKVTLRGERMYEFLDKLISVSLPRVRDFQGVSKKAFDGRGNYTLGVKEQLIFPEIDYDKVSKVRGMDIVIVTTANTDEEARELLANFGMPFRK

SEQ ID NO: 757 - protein, 132 aa, Staphylococcus aureus
MTMTDPIADMLTRVRNANMVRHEKLELPASNIKKEIAEILKSEGFIKNVEYVEDDKQGVLRLFLKYGQNDERVITGLKRISKPGLRVYAKASEMPKVLNGLGIALVSTSEGVITDKEARKRNVGGEIIAYVW

SEQ ID NO: 758 - protein, 178 aa, Staphylococcus aureus
MSRVGKKIIDIPSDVTVTFDGNHVTVKGPKGELSRTLNERMTFKQEENTIEVVRPSDSKEDRTNHGTTRALLNNMVQGVSQGYVKVLELVGVGYRAQMQGKDLILNVGYSHPVEIKAEENITFSVEKNTVVKVEGISKEQVGALASNIRSVRPPEPYKGKGIRYQGEYVRRKEGKTGK

SEQ ID NO: 759 - protein, 119 aa, Staphylococcus aureus
MISKIDKNKVRLKRHARVRTNLSGTAEKPRLNVYRSNKHIYAQIIDDNKGVTLAQASSKDSDIATTATKVELATKVGEAIAKKAADKGIKEIVFDRGGYLYHGRVKALAEAARESGLEF

SEQ ID NO: 760 - protein, 166 aa, Staphylococcus aureus
MARREEETKEFEERVVTINRVAKVVKGGRRFRFTALVVVGDKNGRVGFGTGKAQEVPEAIKKAVEAAKKDLVVVPRVEGTTPHTITGRYGSGSVFMKPAAPGTGVIAGGPVRAVLELAGITDILSKSLGSNTPINMVRATIDGLQNLKNAEDVAKLRGKTVEELYN

SEQ ID NO: 761 - protein, 430 aa, Staphylococcus aureus
MIQTLVNFFRTKEVRNKIFFTLAMLVIFKIGTYIPAPGVNPAAFDNPQGSQGATELLNTFGGGALKRFSIFAMGIVPYITASIVMQLLQMDIVPKFSEWAKQGEVGRRKLNNVTRYLAISLAFIQSIGMAFQFNNYLKGALIINQSIMSYLLIALVLTAGTAFLIWLGDQITQFGVGNGISIIIFAGILSTLPASLIQFGQTAFVGQEDTSLAWLKVLGLLVSLILLTVGAIYVLEAVRKIPIQYAKKQTAQRLGSQATYLPLKVNSAGVIPVIFAMAFFLLPRTLTLFYPDKEWAQNIANAANPSSNVGMVVYIVLIILFTYFYAFVQVNPEKMADNLKKQGSYVPGIRPGEQTKKYITKVLYRLTFVGSIFLAVISILPILATKFMGLPQSIQIGGTSLLIVIGVAIETMKSLEAQVSQKEYKGFGGR

SEQ ID NO: 762 - protein, 215 aa, Staphylococcus aureus
MNIILMGLPGAGKGTQASEIVKKFPIPHISTGDMFRKAIKEETELGKEAKSYMDRGELVPDEVTVGIVKERISEDDAKKGFLLDGFPRTIEQAEALNNIMSELDRNIDAVINIEVPEEELMNRLTGRRICESCGTTYHLVFNPPKVEGICDIDGGKLYQREDDNPETVANRLSVNIKQSKPILDFYDQKGVLKNIDGSKDISDVTKDVIDILDHL

SEQ ID NO: 763 - protein, 72 aa, Staphylococcus aureus
MAKQDVIELEGTVLDTLPNAMFKVELENGHEILAHVSGKIRMNYIRILPGDKVTVEMSPYDLTRGRITYRYK

SEQ ID NO: 764 - protein, 121 aa, Staphylococcus aureus
MARIAGVDIPREKRVVISLTYIYGIGTSTAQKILEEANVSADTRVKDLTDDELGRIREVVDGYKVEGDLRRETNLNIKRLMEISSYRGIRHRRGLPVRGQKTKNNARTRKGPVKTVANKKK

SEQ ID NO: 765 - protein, 129 aa, Staphylococcus aureus
MARKQVSRKRRVKKNIENGVAHIRSTFNNTIVTITDEFGNALSWSSAGALGFKGSKKSTPFAAQMASETASKSAMEHGLKTVEVTVKGPGPGRESAIRALQSAGLEVTAIRDVTPVPHNGCRPPKRRRV

SEQ ID NO: 766 - protein, 314 aa, Staphylococcus aureus
MIEIEKPRIETIEISEDAKFGKFVVEPLERGYGTTLGNSLRRILLSSLPGAAVKYIEIEGVLHEFSAVDNVVEDVSTIIMNIKQLALKIYSEEDKTLEIDVRDEGEVTASDITHDSDVEILNPELKIATVSKGGHLKIRLVANKGRGYALAEQNNTSDLPIGVIPVDSLYSPVERVNYTVENTRVGQSSDFDKLTLDVWTNGSITPQESVSLAAKIMTEHLNIFVGLTDEAQNAEIMIEKEEDQKEKVLEMSIEELDLSVRSYNCLKRAGINSVQELADKSEADMMKVRNLGRKSLEEVKYKLEDLGLGLRKED

SEQ ID NO: 767 - protein, 122 aa, Staphylococcus aureus
MGYRKLGRTSDQRKAMLRDLATSLIISERIETTEARAKEVRSVVEKLITLGKKGDLASRRNAAKTLRNVEILNEDETTQTALQKLFGEIAERYTERQGGYTRILKQGPRRGDGAESVIIELV

SEQ ID NO: 768 - protein, 235 aa, Staphylococcus aureus
MQMARKVVVVDDEKPIADILEFNLKKEGYDVYCAYDGNDAVDLIYEEEPDIVLLDIMLPGRDGMEVCREVRKKYEMPIIMLTAKDSEIDKVLGLELGADDYVTKPFSTRELIARVKANLRRHYSQPAQDTGNVTNEITIKDIVIYPDAYSIKKRGEDIELTHREFELFHYLSKHMGQVMTREHLLQTVWGYDYFGDVRTVDVTIRRLREKIEDDPSHPEYIVTRRGVGYFLQQHE

SEQ ID NO: 769 - protein, 608 aa, Staphylococcus aureus
MKWLKQLQSLHTKLVIVYVLLIIIGMQIIGLYFTNNLEKELLDNFKKNITQYAKQLEISIEKVYDEKGSVNAQKDIQNLLSEYANRQEIGEIRFIDKDQIIIATTKQSNRSLINQKANDSSVQKALSLGQSNDHLILKDYGGGKDRVWVYNIPVKVDKKVIGNIYIESKINDVYNQLNNINQIFIVGTAISLLITVILGFFIARTITKPITDMRNQTVEMSRGNYTQRVKIYGNDEIGELALAFNNLSKRVQEAQANTESEKRRLDSVITHMSDGIIATDRRGRIRIVNDMALKMLGMAKEDIIGYYMLSVLSLEDEFKLEEIQENNDSFLLDLNEEEGLIARVNFSTIVQETGFVTGYIAVLHDVTEQQQVERERREFVANVSHELRTPLTSMNSYIEALEEGAWKDEELAPQFLSVTREETERMIRLVNDLLQLSKMDNESDQINKEIIDFNMFINKIINRHEMSAKDTTFIRDIPKKTIFTEFDPDKMTQVFDNVITNAMKYSRGDKRVEFHVKQNPLYNRMTIRIKDNGIGIPINKVDKIFDRFYRVDKARTRKMGGTGLGLAISKEIVEAHNGRIWANSVEGQGTSIFITLPCEVIEDGDWDE

SEQ ID NO: 770 - protein, 349 aa, Staphylococcus aureus
MSDFQREQRKNEHVEIAMAQSDAMHSDFDKMRFVHHSIPSINVNDIDLTSQTPDLTMAYPIYINAMTGGSEWTKNINEKLAVVARETRLAMAVGSTHAALRNPRMAETFTIARKMNPEGMIFSNVGADVPVEKALEAVELLEAQALQIHVNSPQELVMPEGNREFVTWLDNIASIVSRVSVPVIIKEVGFGMSKELMHDLQQIGVKYVDVSGKGGTNFVDIENERRANKDMDYLSSWGQSTVESLLETTAYQSEISVFASGGLRTPLDAIKSLALGAKATGMSRPFLNQVENNGIAHTVAYVESFIEHMKSIMTMLDAKNIDDLTQKQIVFSPEIMSWIEQRSLNIHRG

SEQ ID NO: 771 - protein, 616 aa, Staphylococcus aureus
MNQIEEALTGLISKDPAIVNENANKDSDTFSTMRDLTAGIVSKSYALNYLLPKHVADAHQRGDIHFHDLDYHPFQPLTNCCLIDAKNMLHNGFEIGNANVTSPKSIQTASAQLVQIIANVSSSQYGGCTVDRVDELLSTYARHNEEQHRNIAKQFVKESEIDRYVDQQVTKDINDAIESLEYEINTLYTSNGQTPFVTLGFGLGTDHLSRKIQQAILNTRIKGLGKDRTTAIFPKLVFSIKKGTNFSPQDPNYDIKQLALKCSTKRMYPDILNYDKLVEILGDFKAPMGCRSFLPSWKDAEGHFENNGRCNLGVVTLNLPRMALESAGNMTKFWEIFYERIDVLHDALLYRINRLKDAVPNNAPILYKSGAFNYKLKETDDVAELFKNKRATISMGYIGLYETATVFYGPDWETSQEAKAFTLEILKEMKRYQTKWTELYDIWFSIYSTPSESLTDRFCRLDQERFGDIKDITDKGYYQNSFHYDVRKDVTPFEKLDFEKDYPYYASGGFIHYCEYPKLQHNLKALEAVWDYSYDKVGYLGTNIPIDHCYECDYDGDFEATEKGFKCPNCGNDNPKTVDVVKRTCGYLGNPVQRPVIKGRHKEICARVKHMKAPKE

SEQ ID NO: 772 - protein, 178 aa, Staphylococcus aureus
MTLLDIKQGQGYIAKIESNSFVDGEGVRCSVYVSGCPFNCVGCYNKASQKFRYGEKYTDEILAEILDDCDHDYISGLSLLGGEPFCNLDITLNLVKAFRARFGNTKTIWVWTGFLYEYLANDCTERRELLSYIDVLVDGLFIQHLFKPDLPYKGSLNQRIIDVQQSLSHARMIEYIVS

SEQ ID NO: 773 - protein, 351 aa, Staphylococcus aureus
MKALVKTREGHGNLELLDKEVATPLDDKVKIKVHYAGICGTDIHTYEGHYKVNFPVTLGHEFSGEIVEVGADVKDFKVGDRVTSETTFYVCNECEYCKSKDYNLCNHRKGIGTQVDGVFTNYVIAREESLHHIPDEVSYQSAAMTEPLACAHHGVSKIQVNSGDVAVVMGPGPIGLLVAQVLKSKGATVVVTGLDNDKVRLDKAEALHMDYVVNLQQTDLKTYINGITDGYGADVVVECSGAVPAARQGLDIIRKKGFYSQIGIFKDAEIPFDMEKVIQKEITVVGSRSQKPADWEPSLQLMADGLVNAEALVTKIYDISKWDEAYQHLKSGEGIKALLKPLDLDENEGEN

SEQ ID NO: 774 - protein, 453 aa, Staphylococcus aureus
MSEKEIWEKVLEIAQEKLSAVSYSTFLKDTELYTIKDGEAIVLSSIPFNANWLNQQYAEIIQAILFDVVGYEVKPHFITTEELANYSNNETATPKETTKPSTETTEDNHVLGREQFNAHNTFDTFVIGPGNRFPHAASLAVAEAPAKAYNPLFIYGGVGLGKTHLMHAIGHHVLDNNPDAKVIYTSSEKFTNEFIKSIRDNEGEAFRERYRNIDVLLIDDIQFIQNKVQTQEEFFYTFNELHQNNKQIVISSDRPPKEIAQLEDRLRSRFEWGLIVDITPPDYETRMAILQKKIEEEKLDIPPEALNYIANQIQSNIRELEGALTRLLAYSQLLGKPITTELTAEALKDIIQAPKSKKITIQDIQKIVGQYYNVRIEDFSAKKRTKSIAYPRQIAMYLSRELTDFSLPKIGEEFGGRDHTTVIHAHEKISKDLKEDPIFKQEVENLEKEIRNV

SEQ ID NO: 775 - protein, 377 aa, Staphylococcus aureus
MMEFTIKRDYFITQLNDTLKAISPRTTLPILTGIKIDAKEHEVILTGSDSEISIEITIPKTVDGEDIVNISETGSVVLPGRFFVDIIKKLPGKDVKLSTNEQFQTLITSGHSEFNLSGLDPDQYPLLPQVSRDDAIQLSVKVLKNVIAQTNFAVSTSETRPVLTGVNWLIQENELICTATDSHRLAVRKLQLEDVSENKNVIIPGKALAELNKIMSDNEEDIDIFFASNQVLFKVGNVNFISRLLEGHYPDTTRLFPENYEIKLSIDNGEFYHAIDRASLLAREGGNNVIKLSTGDDVVELSSTSPEIGTVKEEVDANDVEGGSLKISFNSKYMMDALKAIDNDEVEVEFFGTMKPFILKPKGDDSVTQLILPIRTY

SEQ ID NO: 776 - protein, 238 aa, Staphylococcus aureus
MIYAGILAGGIGSRMGNVPLPKQFLDIDNKPILIHTIEKFILVSEFNEIIIATPAQWISHTQDILKKYNITDQRVKVVAGGTDRNETIMNIIDHIRNVNGINNDDVIVTHDAVRPFLTQRIIKENIEVAAKYGAVDTVIEAIDTIVMSKDKQNIHSIPVRNEMYQGQTPQSFNIKLLQDSYRALSSEQKEILSDACKIIVESGHAVKLVRGELYNIKVTTPYDLKVANAIIQGDIADD

SEQ ID NO: 777 - protein, 341 aa, Staphylococcus aureus
MINQVYQLVAPRQFDVTYNNVDIYGNHVIVRPLYLSICAADQRYYTGRRDENVLRKKLPMSLVHEAVGEVVFDSKGVFEKGTKVVMVPNTPTEQHHIIAENYLASSYFRSSGYDGFMQDYVVMAHDRIVPLPNDIDLSTISYTELVSVSYHAIQRFERKSIPLKNSFGIWGDGNLGYITAILLRKLYPEAKIYVFGKTDYKLSHFSFVDDIFTVNQIPDDLKIDHAFECVGGKGSQVALQQIVEHISPEGSIALLGVSELPVEVNTRLVLEKGLTLIGSSRSGSKDFEQVVDLYRKYPDIVEKLALLKGHEINVCTMQDIVQAFEMDLSTSWGKTVLKWTI

SEQ ID NO: 778 - protein, 450 aa, Staphylococcus aureus
MRRHAIILAAGKGTRMKSKKYKVLHEVAGKPMVEHVLESVKGSGVDQVVTIVGHGAESVKGHLGERSLYSFQEKQLGTAHAVQMAKSHLEDKEGTTIVVCGDTPLITKETLETLIAHHEDANAQATVLSASIQQPYGYGRIVRNASGRLERIVEEKDATQAEKDINEISSGIFAFNNKTLFEKLTQVKNDNAQGEYYLPDVLSLILNDGGIVEVYRTNDVEEIMGVNDRVMLSQAEKAMQRRTNHYHMLNGVTIIDPDSTFIGPDVTIGSDTVIEPGVRINGRTEIGEDVVIGQYSEINNSTIENGACIQQSVVNDASVGANTKVGPFAQLRPGAQLGADVKVGNFVEIKKADLKDGAKVSHLSYIGDAVIGERTNIGCGTITVNYDGENKFKTIVGKDSFVGCNVNLVAPVTIGDDVLVAAGSTITDDVPNDSLAVARARQTTKEGYRK

SEQ ID NO: 779 - protein, 321 aa, Staphylococcus aureus
MLNNEYKNSSLKIFSLKGNEALAQEVADQVGIELGKCSVKRFSDGEIQINIEESIRGCDVFIIQPTSYPVNLHLMELLIMIDACKRASAATINIVVPYYGYARQDRKARSREPITAKLVANLIETAGATRMIALDLHAPQIQGFFDIPIDHLMGVPILAKHFKDDPNINPEECVVVSPDHGGVTRARKLADILKTPIAIIDKRRPRPNVAEVMNIVGEIEGRTAIIIDDIIDTAGTITLAAQALKDKGAKEVYACCTHPVLSGPAKERIENSAIKELIVTNSIHLDEDRKPSNTKELSVAGLIAQAIIRVYERESVSVLFD

SEQ ID NO: 780 - protein, 689 aa, Staphylococcus aureus
MADNLVIVESPAKAKTIEKYLGKKYKVIASMGHVRDLPRSQMGVDTEDNYEPKYITIRGKGPVVKELKKHAKKAKNVFLASDPDREGEAIAWHLSKILELEDSKENRVVFNEITKDAVKESFKNPREIEMNLVDAQQARRILDRLVGYNISPVLWKKVKKGLSAGRVQSVALRLVIDRENEIRNFKPEEYWTIEGEFRYKKSKFNAKFLHYKNKPFKLKTKKDVEKITAALDGDQFEITNVTKKEKTRNPANPFTTSTLQQEAARKLNFKARKTMMVAQQLYEGIDLKKQGTIGLITYMRTDSTRISDTAKAEAKQYITDKYGESYTSKRKASGKQGDQDAHEAIRPSSTMRTPDDMKSFLTKDQYRLYKLIWERFVASQMAPAILDTVSLDITQGDIKFRANGQTIKFKGFMTLYVETKDDSDSEKENKLPKLEQGDKVTATQIEPAQHYTQPPPRYTEARLVKTLEELKIGRPSTYAPTIDTIQKRNYVKLESKRFVPTELGEIVHEQVKEYFPEIIDVEFTVNMETLLDKIAEGDITWRKVIDGFFSSFKQDVERAEEEMEKIEIKDEPAGEDCEVCGSPMVIKMGRYGKFMACSNFPDCRNTKAIVKSIGVKCPKCNDGDVVERKSKKNRVFYGCSKYPECDFISWDKPIGRDCPKCNQYLVENKKGKTTQVICSNCDYKEAAQK

SEQ ID NO: 781 - protein, 691 aa, Staphylococcus aureus
MLKRLKEKSNDEIVQNTINKRINFIFGVIVFIFAVLVLRLGYLQIAQGSHYKQIIKNDENITVNESVPRGRILDRNGKVLVDNASKMAITYTRGRKTTQSEMLDTAEKLSKLIKMDTKKITERDKKDFWIQLHPKKAKAMMTKEQAMLADGSIKQDQYDKQLLSKIGKSQLDELSSKDLQVLAIFREMNAGTVLDPQMIKNEDVSEKEYAAVSQQLSKLPGVNTSMDWDRKYPYGDTLRGIFGDVSTPAEGIPKELTEHYLSKGYSRNDRVGKSYLEYQYEDVLRGKKKEMKYTTDKSGKVTSSEVLNPGARGQDLKLTIDIDLQKEVEALLDKQIKKLRSQGAKDMDNAMMVVQNPKNGDILALAGKQINKSGKMTDYDIGTFTSQFAVGSSVKGGTLLAGYQNKAIKVGETMVDEPLHFQGGLTKRSYFNKNGHVSINDKQALMHSSNVYMFKTALKLAGDPYYSGMALPSDISSPAQKLRRGLNQVGLGVKTGIDLPNETRGQIEPLTNNPGNYLDLSIGQYDTYTPLQLSQYVSTIANDGYRIQPHIGLTIHESTNKDEVGPLKKKINGTVLNKVNNTEKEIKQIQEGFKMAFNDKDGTGYVSFKDTVVPTAGKTGTAEVFQNGEPRVNSTYIGYAPIDDPKLAFSIVYTNQPVPPPWLTGGDLGRDVINYYFKQLGKDDKNKDKDK

SEQ ID NO: 782 - protein, 200 aa, Staphylococcus aureus
MARFRGSNWKKSRRLGISLSGTGKELEKRPYAPGQHGPNQRKKLSEYGLQLREKQKLRYLYGMTERQFRNTFDIAGKKFGVHGENFMILLASRLDAVVYSLGLARTRRQARQLVNHGHILVDGKRVDIPSYSVKPGQTISVREKSQKLNIIVESVEINNFVPEYLNFDADSLTGTFVRLPERSELPAEINEQLIVEYYSR

SEQ ID NO: 783 - protein, 238 aa, Staphylococcus aureus
MKYAGILAGGIGSRMGNVPLPKQFLDLDNKPILIHTLEKFILINDFEKIIIATPQQWMTHTKDTLRKFKISDERIEVIQGGSDRNDTIMNIVKHIESTNGINDDDVIVTHDAVRPFLTHRIIKENIQAALEYGAVDTVIDAIDTIVTSKDNQTIDAIPVRNEMYQGQTPQSFNINLLKESYAQLSDEQKSILSDACKIIVETNKPVRLVKGELYNIKVTTPYDLKVANAIIRGGIADD

SEQ ID NO: 784 - protein, 341 aa, Staphylococcus aureus
MINQVYQLVAPRQFEVTYNNVDIYSDYVIVRPLYMSICAADQRYYTGSRDENVLSQKLPMSLIHEGVGEVVFDSKGVFNKGTKVVMVPNTPTEKDDVIAENYLKSSYFRSSGHDGFMQDFVLLNHDRAVPLPDDIDLSIISYTELVTVSLHAIRRFEKKSISNKNTFGIWGDGNLGYITAILLRKLYPESKIYVFGKTDYKLSHFSFVDDVFFINKIPEGLTFDHAFECVGGRGSQSAINQMIDYISPEGSIALLGVSEFPVEVNTRLVLEKGLTLIGSSRSGSKDFQDVVDLYIQYPDIVDKLALLKGQEYEIATINDLTEAFEADLSTSWGKTVLKWIM

SEQ ID NO: 785 - protein, 573 aa, Staphylococcus aureus
MMKFSVIVPTYNSEKYITELLNSLAKQDFPKTEFEVVVVDDCSTDQTLQIVEKYRNKLNLKVSQLETNSGGPGKPRNVALKQAEGEFVLFVDSDDYINKETLKDAAAFIDEHHSDVLLIKMKGVNGRGVPQSMFKETAPEVTLLNSRIIYTLSPTKIYRTALLKDNDIYFPEELKSAEDQLFTMKAYLNANRISVLSDKAYYYATKREGEHMSSAYVSPEDFYEVMRLIAVEILNADLEEAHKDQILAEFLNRHFSFSRTNGFSLKVKLEEQPQWINALGDFIQAVPERVDALVMSKLRPLLHYARAKDIDNYRTVEESYRQGQYYRFDIVDGKLNIQFNEGEPYFEGIDIAKPKVKMTAFKFDNHKIVTELTLNEFMIGEGHYDVRLKLHSRNKKHTMYVPLSVNANKQYRFNIMLEDIKAYLPKEKIWDVFLEVQIGTEVFEVRVGNQRNKYAYTAETSALIHLNNDFYRLTPYFTKDFNNISLYFTAITLTDSISMKLKGKNKIILTGLDRGYVFEEGMASVVLKDDMIMGMLSQTSENEVEILLSKDIKKRDFKNIVKLNTAHMTYSLK

SEQ ID NO: 786 - protein, 115 aa, Staphylococcus aureus
MEKAYRIKKNADFQRIYKKGHSVANRQFVVYTCNNKEIDHFRLGISVSKKLGNAVLRNKIKRAIRENFKVHKSHILAKDIIVIARQPAKDMTTLQIQNSLEHVLKIAKVFNKKIK

SEQ ID NO: 787 - protein, 167 aa, Staphylococcus aureus
MLNRVVLVGRLTKDPEYRTTPSGVSVATFTLAVNRTFTNAQGEREADFINCVVFRRQADNVNNYLSKGSLAGVDGRLQSRNYENQEGRRVFVTEVVCDSVQFLEPKNAQQNGGQRQQNEFQDYGQGFGGQQSGQNNSYNNSSNTKQSDNPFANANGPIDISDDDLPF

SEQ ID NO: 788 - protein, 80 aa, Staphylococcus aureus
MAGGPRRGGRRRKKVCYFTANGITHIDYKDTELLKRFISERGKILPRRVTGTSAKYQRMLTTAIKRSRHMALLPYVKEEQ

SEQ ID NO: 789 - protein, 425 aa, Staphylococcus aureus
MQSLDKNFRHLSRQQKLQQLVDKQWLSEDQFDILLNHPLIDEEVANSLIENVIAQGALPVGLLPNIIVDDKAYVVPMMVEEPSVVAAASYGAKLVNQTGGFKTVSSERIMIGQIVFDGVDDTEKLSADIKALEKQIHKIADEAYPSIKARGGGYQRIAIDTFPEQQLLSLKVFVDTKDAMGANMLNTILEAITAFLKNESPQSDILMSILSNHATASVVKVQGEIDVKDLARGERTGEEVAKRMERASVLAQVDIHRAATHNKGVMNGIHAVVLATGNDTRGAEASAHAYASRDGQYRGIATWRYDQKRQRLIGTIEVPMTLAIVGGGTKVLPIAKASLELLNVDSAQELGHVVAAVGLAQNFAACRALVSEGIQQGHMSLQYKSLAIVVGAKGDEIAQVAEALKQEPRANTQVAERILQEIRQQ

SEQ ID NO: 790 - protein, 318 aa, Staphylococcus aureus
MNYQVLLYYKYTTIDDPEQFAQDHLAFCKAHHLKGRILVSTEGINGTLSGTKEETEQYMAHMHADERFKDMVFKIDEAEGHAFKKMHVRPRKEIVALDLEDDVDPRHTTGQYLSPVEFRKALEDDDTVIIDARNDYEFDLGHFRGAIRPDITRFRDLPDWIKENKALFTDKKVVTYCTGGIRCEKFSGWLLKEGFEDVAQLHGGIATYGKDPETKGQYWDGKMYVFDDRISVDINQVEKTIIGKDWFDGKPCERYINCANPECNKQILVSEENETKYLGACSYECAKHERNRYVQANNISDNEWQQRLTNFDDLHQHA

SEQ ID NO: 791 - protein, 692 aa, Staphylococcus aureus
MALLEAFLIFIFAVIISSVINNRFPQIPTAFIQIALGVVIFIIPIQVDFQFNSEVFMFAVIAPLLFVEGTHVSRTKLLEYRKPILLMSMALVFATVVGVGYFIHWIWPALPMPAAFAIAAILCPTDAVAVSAITRGKLLPKGSMTILEGESLLNDAAGIISFKIAVTALVTGTFSLFQAVEQFIISTILGVLIGAIIGFVVVRIRIDLTANKGLKDNNTLTFIQLLTPFVVYFLAEEVHASGIIAVVIAGLIHGLERDRLIRAQTELQMNYHQIWNTFSYALNGFVFVVLGFMIPTVVIDIFQTEPDNFSFLIVITILIAIAIYACRFVWVYFWYKDFYFPKNIQSYLDEEHDSHETPPSRVRYAFIMTMCGIHGTISLSMALTLPFIITKGQAFEYRNDLLFIASFMVLISLILAQIVLPLITPSAEDTTFKGMTYQSAKIFIVQKVIQHFKNESKKDKNDTNYRPVLNQYYGELLFLLNSEPNNQNTKELKRLEDIAKVIETSTLERLIDKGKATYQDINNYRNIVELTETHRTASFVEKFANFFKMLWLRLKAMKHYKALNKESKKQEFENSFKDVQKIMRIVNHNIILRLKEEQNSTNVLEVSLVINHYYDMSRSLKWRAQRRKERQENSNQIIPQAMFHNHKLEALYLQRHLLDELIRKNKINNIVAAQIRENINYNEIVLSLQSKH

SEQ ID NO: 792 - protein, 400 aa, Staphylococcus aureus
MNYSSRQQPDKHWLRKVDWVLVATIAVLAIFSVLLINSAMGGGQYSANFGIRQIFYYILGAIFAGIIMFISPKKIKHYTYLLYFLICLLLIGLLVIPESPITPIINGAKSWYTFGPISIQPSEFMKIILILALARVVSRHNQFTFNKSFQSDLLLFFKIIGVSLVPSILILLQNDLGTTLVLAAIIAGVMLVSGITWRILAPIFITGIVGAMTVILGILYAPALIENLLGVQLYQMGRINSWLDPYTYSSGDGYHLTESLKAIGSGQLLGKGYNHGEVYIPENHTDFIFSVIGEELGFIGSVILILIFLFLIFHLIRLAAKIEDQFNKIFIVGFVTLLVFHILQNIGMTIQLLPITGIPLPFISYGGSALWSMMTGIGIVLSIYYHEPKRYVDLYHPKSN

SEQ ID NO: 793 - protein, 286 aa, Staphylococcus aureus
MPLVSMKEMLIDAKENGYAVGQYNINNLEFTQAILEASQEENAPVILGVSEGAARYMSGFYTIVKMVEGLMHDLNITIPVAIHLDHGSSFEKCKEAIDAGFTSVMIDASHSPFEENVATTKKVVEYAHEKGVSVEAELGTVGGQEDDVVADGIIYADPKECQELVEKTGIDALAPALGSVHGPYKGEPKLGFKEMEEIGLSTGLPLVLHGGTGIPTKDIQKAIPFGTAKINVNTENQIASAKAVRDVLNNDKEVYDPRKYLGPAREAIKETVKGKIKEFGTSNRAK

SEQ ID NO: 794 - protein, 176 aa, Staphylococcus aureus
MKIQDYTKQMVDEKSFIDMAYTLLNDKGETMNLYDIIDEFRALGDYEYEEIENRVVQFYTDLNTDGRFLNVGENLWGLRDWYSVDDIEEKIAPTIQKFDILDADDEEDQNLKLLGEDEMDDDDDIPAQTDDQEELNDPEDEQVEEEINHSDIVIEEDEDELDEDEEVFEDEEDFND

SEQ ID NO: 795 - protein, 601 aa, Staphylococcus aureus
MCGIVGYIGYDNAKELLLKGLEKLEYRGYDSAGIAVVNDDNTTVFKEKGRIAELRKVADSSDFDGPVGIGHTRWATHGVPNHENSHPHQSSNGRFTLVHNGVIENYEELKGEYLQGVSFISETDTEVIVQLVEYFSNQGLSTEEAFTKVVSLLHGSYALGLLDAEDKDTIYVAKNKSPLLLGVGEGFNVIASDALAMLQVTSEYKEIHDHEIVIVKKDEVIIKDADGNVVERDSYIAEIDASDAEKGVYAHYMLKEIHEQPAVMRRIIQEYQDAEGNLKIDQDIINDVKEADRIYVIAAGTSYHAGLVGKEFLEKWAGVPTEVHVASEFVYNMPLLSEKPLFVYISQSGETADSRAVLVETNKLGHKSLTITNVAGSTLSREADHTLLLHAGPEIAVASTKAYTAQIAVLSILSQIVAKEHGREADIDLLRELAKVTTAIEAIVDDAPIMEQIATDFLETTRNAFFIGRTIDYNVSLEGALKLKEISYIQAEGFAGGELKHGTIALIEDGTPVVALATQENVNLSIRGNVKEVVARGAHPCIISMEGLEKEGDTYVIPHVHELLTPLVSVVALQLISYYAALHRDLDVDKPRNLAKSVTVE

SEQ ID NO: 796 - protein, 711 aa, Staphylococcus aureus
MKSLILAEKPSVARDIADALQINQKRNGYFENNQYIVTWALGHLVTNATPEQYDKNLKEWRLEDLPIIPKYMKTVVIGKTSKQFKTVKALILDNKVKDIIIATDAGREGELVARLILDKVGNKKPIRRLWISSVTKKAIQQGFKNLKDGRQYNDLYYAALARSEADWIVGINATRALTTKYDAQLSLGRVQTPTIQLVNTRQQEINQFKPQQYFTLSLTVKGFDFQLESNQRYTNKETLEQMVNNLKNVDGKIKSVATKHKKSYPQSLYNLTDLQQDMYRRYKIGPKETLNTLQSLYERHKVVTYPRTDSNYLTTDMVDTMKERIQATMATTYKDQARPLMSKTFSSKMSIFNNQKVSDHHAIIPTEVRPVMSDLSNRELKLYDMIVERFLEALMPPHEYDAITVTLEVAGHTFVLKENVTTVLGFKSIRQGESITEMQQPFSEGDEVKISKTNIREHETTPPEYFNEGSLLKAMENPQNFIQLKDKKYAQTLKQTGGIGTVATRADIIDKLFNMNAIESRDGKIKVTSKGKQILELAPEELTSPLLTAQWEEKLLLIERGKYQAKTFINEMKDFTKDVVNGIKNSDRKYKHDNLTTTECPTCGKFMIKVKTKNGQMLVCQDPSCKTKKNVQRKTNARCPNCKKKLTLFGKGKEAVYRCVCGHSETQAHMDQRMKSKSSGKVSRKEMKKYMNKNEGLDNNPFKDALKNLNL

SEQ ID NO: 797 - protein, 421 aa, Staphylococcus aureus
MEKMHITNQEHDAFVKSHPNGDLLQLTKWAETKKLTGWYARRIAVGRDGEVQGVAQLLFKKVPKLPYTLCYISRGFVVDYSNKEALNALLDSAKEIAKAEKAYAIKIDPDVEVDKGTDALQNLKALGFKHKGFKEGLSKDYIQPRMTMITPIDKNDDELLNSFERRNRSKVRLALKRGTTVERSDREGLKTFAELMKITGERDGFLTRDISYFENIYDALHEDGDAELFLVKLDPKENIAKVNQELNELHAEIAKWQQKMETSEKQAKKAQNMINDAQNKIAKNEDLKRDLEALEKEHPEGIYLSGALLMFAGSKSYYLYGASSNEFRDFLPNHHMQYTMMKYAREHGATTYDFGGTDNDPDKDSEHYGLWAFKKVWGTYLSEKIGEFDYILNQPLYQLIEQVKPRLTKAKIKISRKLKRK

SEQ ID NO: 798 - protein, 252 aa, Staphylococcus aureus
MIVKTEEELQALKEIGYICAKVRNTMQAATKPGITTKELDNIAKELFEEYGAISAPIHDENFPGQTCISVNEEVAHGIPSKRVIREGDLVNIDVSALKNGYYADTGISFVVGESDDPMKQKVCDVATMAFENAIAKVKPGTKLSNIGKAVHNTARQNDLKVIKNLTGHGVGLSLHEAPAHVLNYFDPKDKTLLTEGMVLAIEPFISSNASFVTEGKNEWAFETSDKSFVAQIEHTVIVTKDGPILTTKIEEE

SEQ ID NO: 799 - protein, 420 aa, Staphylococcus aureus
MTNVLIEDLKWRGLIYQQTDEQGIEDLLNKEQVTLYCGADPTADSLHIGHLLPFLTLRRFQEHGHRPIVLIGGGTGMIGDPSGKSEERVLQTEEQVDKNIEGISKQMHNIFEFGTDHGAVLVNNRDWLGQISLISFLRDYGKHVGVNYMLGKDSIQSRLEHGISYTEFTYTILQAIDFGHLNRELNCKIQVGGSDQWGNITSGIELMRRMYGQTDAYGLTIPLVTKSDGKKFGKSESGAVWLDAEKTSPYEFYQFWINQSDEDVIKFLKYFTFLGKEEIDRLEQSKNEAPHLREAQKTLAEEVTKFIHGEDALNDAIRISQALFSGDLKSLSAKELKDGFKDVPQVTLSNDTTNIVEVLIETGISPSKRQAREDVNNGAIYINGERQQDVNYALAPEDKIDGEFTIIRRGKKKYFMVNYQ

SEQ ID NO: 800 - protein, 398 aa, Staphylococcus aureus
MLNNKRLFTSESVTEGHPDKIADQVSDAILDAILKDDPNARVACETTVTTGMALIAGEISTTTYVDIPKVVRETIKEIGYTRAKYGYDYETMAILTAIDEQSPDIAQGVDKALEYRDKDSEEEIEATGAGDQGLMFGYATNETETYMPLAIYLSHQLAKRLSDVRKDGTLNYLRPDGKVQVTVEYDENDNPVRIDTIVVSTQHADDVTLEQIQEDIKAHVIYPTVPENLINEQTKFYINPTGRFVIGGPQGDAGLTGRKIIVDTYGGYARHGGGCFSGKDPTKVDRSAAYAARYVAKNIVAAGLADQCEVQLAYAIGVAEPVSIAIDTFGTGKVSEGQLVEAVRKHFDLRPAGIIKMLDLKQPIYKQTAAYGHFGRTDVLFPWEKLDKVEELKDAVKY

SEQ ID NO: 801 - protein, 564 aa, Staphylococcus aureus
MVLYIILAIIVIILIAVGVLFYLRSNKRQIIEKAIERKNEIETLPFDQNLAQLSKLNLKGETKTKYDAMKKDNVESTNKYLAPVEEKIHNAEALLDKFSFNASQSEIDDANELMDSYEQSYQQQLEDVNEIIALYKDNDELYDKCKVDYREMKRDVLANRHQFGEAASLLETEIEKFEPRLEQYEVLKADGNYVQAHNHIAALNEQMKQLRSYMEEIPELIRETQKELPGQFQDLKYGCRDLKVEGYDLDHVKVDSTLQSLKTELSFVEPLISRLELEEANDKLANINDKLDDMYDLIEHEVKAKNDVEETKDIITDNLFKAKDMNYTLQTEIEYVRENYYINESDAQSVRQFENEIQSLISVYDDILKEMSKSAVRYSEVQDNLQYLEDHVTVINDKQEKLQNHLIQLREDEAEAEDNLLRVQSKKEEVYRRLLASNLTSVPERFIIMKNEIDHEVRDVNEQFSERPIHVKQLKDKVSKIVIQMNTFEDEANDVLVNAVYAEKLIQYGNRYRKDYSNVDKSLNEAERLFKNNRYKRAIEIAEQVLESVEPGVTKHIEEEVIKQ

SEQ ID NO: 802 - protein, 205 aa, Staphylococcus aureus
MYSVISKILNFILVKMSKSLYVIGKDNIPKDSKYVVTCTHESYNEVIMLGMALYPNQIHYMAKKELFKNKWIGKFLTSLNAFPVDRENPGPSTLKRPINLLKDNKTVGIFPTGSRTSQEGAPLKRGASTIAMLSKSPILPVAYVGPTKIHGLLTGQAYINIGKPIDINDLPKDLKRNERIDYITKEIETRTAKLQQELHEIVKSL

SEQ ID NO: 803 - protein, 306 aa, Staphylococcus aureus
MEVTFFGTSAGLPTKERNTQAIALNLEPYSNSIWLFDVGEGTQHQILHHAIKLGKVTHIFITHMHGDHIFGLPGLLSSRSFQGGEQKPLTLVGPKGIKAYVEMSMNLSESHLNYPITYIEIDDHLTYHHDGFTVEAHLLNHGIPSYGYRVMAPETTGTINVEALKNIGLEPGPKYQEVKSHDTFEHNGQVYQSKDFRGESKQGPVVAIFGDTKPCSNERVISRDADVMVHEATYIDGEKHLANNYHHSHIEDVFALIKEANVKRTLITHLSNRYNTEDINEIYQILIQNEDTPNFNFVKDFDSFKV

SEQ ID NO: 804 - protein, 494 aa, Staphylococcus aureus
MSTKNKHIPCLITIFGATGDLSHRKLFPSIFHLYQQDNLDEHIAIIGIGRRDITNDDFRNQVKSSIQKHVKDTNKIDAFMEHVFYHRHDVSNEESYQELLDFSNELDSQFELKGNRLFYLAMAPQFFGVISDYLKSSGLTDTKGFKRLVIEKPFGSDLKSAEALNNQIRKSFKEEEIYRIDHYLGKDMVQNIEVLRFANAMFEPLWNNKYISNIQVTSSEILGVEDRGGYYESSGALKDMVQNHMLQMVALLAMEAPISLNSEDIRAEKVKVLKSLRHFQSEDVKKNFVRGQYGEGYIDGKQVKAYRDEDRVADDSNTPTFVSGKLTIDNFRWAGVPFYIRTGKRMKSKTIQVVVEFKEVPMNLYYETDKLLDSNLLVINIQPNEGVSLHLNAKKNTQGIETEPVQLSYSMSAQDKMNTVDAYENLLFDCLKGDATNFTHWEELKSTWKFVDAIQDEWNMVDPEFPNYESGTNGPLESDLLLARDGNHWWDDIQ

SEQ ID NO: 805 - protein, 463 aa, Staphylococcus aureus
MAKDMDTIVSLAKHRGFVFPGSDIYGGLSNTWDYGPLGVELKNNVKKAWWQKFITQSPFNVGIDAAILMNPKVWEASGHLNNFNDPMIDNKDSKIRYRADKLIEDYMQDVKGDENFIADGLSFEQMKKIIDDEGIVCPVSKTANWTEIRQFNLMFKTFQGVTEDSTNEIFLRPETAQGIFVNYKNVQRSMRKKLPFGIGQIGKSFRNEITPGNFIFRTREFEQMELEFFCKPGEEIEWQNYWKTFASDWLTSLNMSSENMRLRDHDEDELSHYSNATTDIEYKFPFGWGELWGIASRTDFDLRKHAEHSGEDFRYHDPETNEKYIPYCIEPSLGADRVTLAFLCDAYDEEGVEGSKDARTVLHFHPALAPYKAAILPLSKKLSGEAIKIFEQLSSKFSIDFDESQSIGKRYRRQDEIGTPYCVTFDFDSLEDNQVTVRDRDSMEQVRMPISELEAFLTEKTKF

SEQ ID NO: 806 - protein, 58 aa, Staphylococcus aureus
MSKTVVRKNESLEDALRRFKRSVSKSGTIQEVRKREFYEKPSVKRKKKSEAARKRKFK

SEQ ID NO: 807 - protein, 645 aa, Staphylococcus aureus
MEQINIQFPDGNKKAFDKGTTTEDIAQSISPGLRKKAVAGKFNGQLVDLTKPLETDGSIGIVTPGSEEALEVLRHSTAHLMAHAIKRLYGNVKFGVGPVIEGGFYYDFDIDQNISSDDFEQIEKTMKQIVNENMKIERKVVSRDEAKELFSNDEYKLELIDAIPEDENVTLYSQGDFTDLCRGVHVPSTAKIKEFKLLSTAGAYWRGDSNNKMLQRIYGTAFFDKKELKAHLQMLEERKERDHRKIGKELELFTNSQLVGAGLPLWLPNGATIRREIERYIVDKEVSMGYDHVYTPVLANVDLYKTSGHWDHYQEDMFPPMQLDETESMVLRPMNCPHHMMIYANKPHSYRELPIRIAELGTMHRYEASGAVSGLQRVRGMTLNDSHIFVRPDQIKEEFKRVVNMIIDVYKDFGFEDYSFRLSYRDPEDKEKYFDDDDMWNKAENMLKEAADELGLSYEEAIGEAAFYGPKLDVQVKTAMGKEETLSTAQLDFLLPERFDLTYIGQDGEHHRPVVIHRGVVSTMERFVAFLTEETKGAFPTWLAPKQVQIIPVNVDLHYDYARQLQDELKSQGVRVSIDDRNEKMGYKIREAQMQKIPYQIVVGDKEVENNQVNVRQYGSQDQETVEKDEFIWNLVDEIRLKKHR

SEQ ID NO: 808 - protein, 89 aa, Staphylococcus aureus
MAKKSKIAKERKREELVNKYYELRKELKAKGDYEALRKLPRDSSPTRLTRRCKVTGRPRGVLRKFEMSRIAFREHAHKGQIPGVKKSSW

SEQ ID NO: 809 - protein, 430 aa, Staphylococcus aureus
MKTTIKQAKDHLNQDVTIGAWLTNKRSSGKIAFLQLRDGTGFMQGVVVKSEVDEEVFKLAKEIAQESSLYVTGTITEDNRSDLGYEMQVKSIEVISEAHDYPITPKNHGTEFLMDHRHLWLRSKKQHAVMKIRNEVIRATYEFFNKDGFTKVDPPILTASAPEGTSELFHTKYFDQDAFLSQSGQLYLEAAAMAHGKVFSFGPTFRAEKSKTRRHLIEFWMIEGEMAFTNHAESLEIQEQYVTHVVKSVLENCKLELKILERDTSKLEKVATPFPRISYDDAIEFLKAEGFDDIEWGEDFGAPHETAIANHYDLPVFITNYPTKIKPFYMQPNPENEETVLCADLIAPEGYGEIIGGSERVDDLELLEQRVKEHGLDEEAYSYYLDLRRYGSVPHCGFGLGLERTVAWISGVEHVRETAPFPRLLNRLYP

SEQ ID NO: 810 - protein, 90 aa, Staphylococcus aureus
MNKTDLINAVAEQADLTKKEAGSAVDAVFESIQNSLAKGEKVQLIGFGNFEVRERAARKGRNPQTGKEIDIPASKVPAFKAGKALKDAVK

SEQ ID NO: 811 - protein, 557 aa, Staphylococcus aureus
MSLIKKKNKDIRIIPLGGVGEIAKNMYIVEVDDEMFMLDAGLMFPEDEMLGIDIVIPDISYVLENKDKLKGIFLTHGHEHAIGAVSYVLEQLDAPVYGSKLTIALIKENMKARNIDKKVRYYTVNNDSIMRFKNVNISFFNTTHSIPDSLGVCIHTSYGAIVYTGEFKFDQSLHGHYAPDIKRMAEIGEEGVFVLISDSTEAEKPGYNTPENVIEHHMYDAFAKVRGRLIVSCYASNFIRIQQVLNIASKLNRKVSFLGRSLESSFNIARKMGYFDIPKDLLIPITEVDNYPKNEVIIIATGMQGEPVEALSQMAQHKHKIMNIEEGDSVFLAITASANMEVIIANTLNELVRAGAHIIPNNKKIHASSHGCMEELKMMINIMKPEYFIPVQGEFKMQIAHAKLAAEAGVAPEKIFLVEKGDVINYNGKDMILNEKVNSGNILIDGIGIGDVGNIVLRDRHLLAEDGIFIAVVTLDPKNRRIAAGPEIQSRGFVYVRESEDLLREAEEKVREIVEAGLQEKRIEWSEIKQNMRDQISKLLFESTKRRPMIIPVISEI

SEQ ID NO: 812 - protein, 183 aa, Staphylococcus aureus
MLTMKDIIRDGHPTLRQKAAELELPLTKEEKETLIAMREFLVNSQDEEIAKRYGLRSGVGLAAPQINISKRMIAVLIPDDGSGKSYDYMLVNPKIVSHSVQEAYLPTGEGCLSVDDNVAGLVHRHNRITIKAKDIEGNDIQLRLKGYPAIVFQHEIDHLNGVMFYDHIDKNHPLQPHTDAVEV

SEQ ID NO: 813 - protein, 373 aa, Staphylococcus aureus
MVYSASMVPATKGTLTGGIDVPGTYFYNRQLAYVIMSFIIVFFIAFLMNVKLLSNIKVQKGMIITIVSLLLLTLVIGKDINGSKSWINLGFMNLQASELLKIAIILYIPFMISKKMPRVLSKPKLILSPIVLALGCTFLVFLQKDVGQTLLILIILVAIIFYSGIGVNKVLRFGIPAVLGFLVVFVIALMAGWLPSYLTARFSTLTDPFQFESGTGYHISNSLLAIGNGGVFGKGLGNSAMKLGYLPEPHTDFIFAIICEELGLIGGLLVITLEFFIVYRAFQFANKTSSYFYKLVCVGIATYFGSQTFVNIGGISATIPLTGVPLPFISFGGSSMISLSIAMGLLLIVGKQIKVDQQRKKQQQKVDIRRQFN

SEQ ID NO: 814 - protein, 443 aa, Staphylococcus aureus
MTHIQLDFSKTLEFFGEHELKQQQEIVKSIHKTIHEGTGAGSDFLGWVDLPVDYDKEEFSRIVEASKRIKENSDVLVVIGIGGSYLGARAAIEMLTSSFRNSNEYPEIVFVGNHLSSTYTKELVDYLADKDFSVNVISKSGTTTEPAVAFRLFKQLVEERYGKEEAQKRIFATTDKEKGALKQLATNEGYETFIVPDDVGGRYSVLTAVGLLPIATAGINIEAMMIGAAKAREELSSDKLEDNIAYQYATIRNILYAKGYTTEMLINYEPSMQYFNEWWKQLFGESEGKDFKGIYPSSANYTTDLHSLGQYVQEGRRFLFETVVKVNHPKYDITIEKDSDDLDGLNYLAGKTIDEVNTKAFEGTLLAHTDGGVPNMVVNIPQLDEETFGYVVYFFELACAMSGYQLGVNPFNQPGVEAYKQNMFALLGKPGFEDLKKELEERL

SEQ ID NO: 815 - protein, 329 aa, Staphylococcus aureus
METLFSGIQPSGIPTIGNYIGALKQFVDVQNDYDCYFCIVDQHAITMPQDRLKLRKQTRQLAAIYLASGIDPDKATLFIQSEVPAHVQAGWMLTTIASVGELERMTQYKDKAQKAVEGIPAGLLTYPPLMAADIVLYNTNIVPVGDDQKQHIELTRNLVDRFNSRYNDVLVKPEIRMPKVGGRVMSLQDPTRKMSKSDDNAKNFISLLDEPNVAAKKIKSAVTDSDGIIKFDRDNKPGITNLISIYAGLTDMPIKDIEAKYEGEGYGKFKGDLAEIVKAFLVEFQEKYESFYNSDKLDDILDQGRDKAHKVSFKTVKKMEKAMGLGRKR

SEQ ID NO: 816 - protein, 291 aa, Staphylococcus aureus
MFIIELIKGIILGVVEGLTEFAPVSSTGHMILVDDMWLKSSEFLGSQSAFTFKIVIQLGSVFAAAWVFRERFLEILHIGKHKHVEGENDQQRRSKPRRLNLLHVLVGMVPAGILGLLFDDFIEEHLFSVPTVMIGLFVGAIYMIIADKYSVKVKNPQTVDQINYFQAFVIGISQAVAMWPGFSRSGSTISTGVLMKLNHKAASDFTFIMAVPIMLAASGLSLLKHYQDIQIADIPFYILGFLAAFTVGLIAIKTFLHLINKIKLIPFAIYRIVLVIFIAILYFGFGIGKGI

SEQ ID NO: 817 - protein, 327 aa, Staphylococcus aureus
MKIRVVIPCFNEGEVITQTHQQLTEILSQDSSVKGYDYNMLFIDDGSTDTTIDEMQHLATIDRHVSFISFSRNFGKEAAMIAGYQHSTEFDAVIMIDCDLQHPPEYIPKMVEGFMEGYDQVIAKRDRSGENFSRKTLSHLYYKLVNCFVEEVQFDDGVGDFRLLSQRAVKSIASLEEYNRFSKGLFEWIGYNTKVFTYQNVERQKGESKWSFKKLFNYGIDGLISFNSKPLRMMIYLGLFIFSISALYIIYLFINIMISGVNIPGYFSTIAAILLLGGIQLISIGVVGEYIGRIYYEVKARPKYIIQATNLSSIENDEKDTHKVYSK

SEQ ID NO: 818 - protein, 374 aa, Staphylococcus aureus
MKVLVAMDEFHGIISSYQANRYVEEAVASQIETADVVQVPLFNGRHELLDSVFLWQSGQKYRIPVHDADMNEVEGVYGQTDTGMTVIEGNLFLKGKKPIVERTSYGLGEMIKHALDNDAKHVVISLGGIDSFDAGAGMLQALGAQFYDDEGRVVDMRQGAGVIKYIRRMDMSNLHPKMETARIQVMSDFSSRLYGKQSEIMQTYDAHQLHHNQAAEIDNLIWYFSELFKSELKIAIGPVERGGAGGGIAAVLNGLYQAEILTSHALVDQLTHLENLVEQADLIIFGEGLNENDQLLETTTLRIAELCHKHQKVAIAICATAEKFDLFESQGVTAMFNTFIDMPETYTDFKMGLQIRHYTVQSLKLLKTHFNVEV

SEQ ID NO: 819 - protein, 843 aa, Staphylococcus aureus
MGFLSKILDGNNKEIKQLGKLADKVIALEEKTAILTDEEIRNKTKQFQTELADIDNVKKQNDYLDKILPEAYALVREGSKRVFNMTPYKVQIMGGIAIHKGDIAEMRTGEGKTLTATMPTYLNALAGRGVHVITVNEYLSSVQSEEMAELYNFLGLTVGLNLNSKTTEEKREAYAQDITYSTNNELGFDYLRDNMVNYSEDRVMRPLHFAIIDEVDSILIDEARTPLIISGEAEKSTSLYTQANVFAKMLKQDEDYKYDEKTKAVHLTEQGADKAERMFKVENLYDVQNVDVISHINTALRAHVTLQRDVDYMVVDGEVLIVDQFTGRTMPGRRFSEGLHQAIEAKEGVQIQNESKTMASITFQNYFRMYNKLAGMTGTAKTEEEEFRNIYNMTVTQIPTNKPVQRNDKSDLIYISQKGKFDAVVEDVVEKHKAGQPVLLGTVAVETSEYISNLLKKRGIRHDVLNAKNHEREAEIVAGAGQKGAVTIATNMAGRGTDIKLGEGVEELGGLAVIGTERHESRRIDDQLRGRSGRQGDKGDSRFYLSLQDELMIRFGSERLQKMMSRLGLDDSTPIESKMVSRAVESAQKRVEGNNFDARKRILEYDEVLRKQREIIYNERNSIIDEEDSSQVVDAMLRSTLQRSINYYINTADDEPEYQPFIDYINDIFLQEGDITEDDIKGKDAEDIFEVVWAKIEAAYQSQKDILEEQMNEFERMILLRSIDSHWTDHIDTMDQLRQGIHLRSYAQQNPLRDYQNEGHELFDIMMQNIEEDTCKFILKSVVQVEDNIEREKTTEFGEAKHVSAEDGKEKVKPKPIVKGDQVGRNDDCPCGSGKKFKNCHGK

SEQ ID NO: 820 - protein, 330 aa, Staphylococcus aureus
MAEPNFWDNQTKAQDIIDKNNALKAIVNGYKTLQAEVDDMDATWDLLQEEFDEEMKEDLEQEVINFKAKVDEYELQLLLDGPHDANNAILELHPGAGGTESQDWANMLFRMYQRYCEKKGFKVETVDYLPGDEAGIKSVTLLIKGHNAYGYLKAEKGVHRLVRISPFDSSGRRHTSFASCDVIPDFNNDEIEIEINPDDITVDTFRASGAGGQHINKTESAIRITHHPSGIVVNNQNERSQIKNREAAMKMLKSKLYQLKLEEQAREMAEIRGEQKEIGWGSQIRSYVFHPYSMVKDHRTNEETGKVDAVMDGDIGPFIESYLRQTMSHD

SEQ ID NO: 821 - protein, 484 aa, Staphylococcus aureus
MSDRIRVRYAPSPTGYLHIGNARTALFNYLYAKHYNGDFVIRIEDTDKKRNLEDGETSQFDNLKWLGLDWDESVDKDNGYGPYRQSERQHIYQPLIDQLLAEDKAYKCYMTEEELEAEREAQIARGEMPRYGGQHAHLTEEQRQQFEAEGRQPSIRFRVPQNQTYSFDDMVKGNISFDSNGIGDWVIVKKDGIPTYNFAVAIDDHYMQISDVIRGDDHISNTPKQIMIYEAFGWEPPRFGHMSLIVNEERKKLSKRDGQILQFIEQYRDLGYLPEALFNFIALLGWSPEGEEEIFSKEEFIKIFDEKRLSKSPAFFDKQKLAWVNNQYMKQKDTETVFQLALPHLIKANLIPEVPSEEDLSWGRKLIALYQKEMSYAGEIVPLSEMFFKEMPALGEEEQQVINGEQVPELMTHLFSKLEALEPFEAAEIKKTIKEVQKETGIKGKQLFMPIRVAVTGQMHGPELPNTIEVLGKEKVLNRLKQYK

SEQ ID NO: 822 - protein, 428 aa, Staphylococcus aureus
MLDIRLFRNEPDTVKSKIELRGDDPKVVDEILELDEQRRKLISATEEMKARRNKVSEEIALKKRNKENADDVIAEMRTLGDDIKEKDSQLNEIDNKMTGILCRIPNLISDDVPQGESDEDNVEVKKWGTPREFSFEPKAHWDIVEELKMADFDRAAKVSGARFVYLTNEGAQLERALMNYMITKHTTQHGYTEMMVPQLVNADTMYGTGQLPKFEEDLFKVEKEGLYTIPTAEVPLTNFYRNEIIQPGVLPEKFTGQSACFRSEAGSAGRDTRGLIRLHQFDKVEMVRFEQPEDSWNALEEMTTNAEAILEELGLPYRRVILCTGDIGFSASKTYDIEVWLPSYNDYKEISSCSNCTDFQARRANIRFKRDKAAKPELAHTLNGSGLAVGRTFAAIVENYQNEDGTVTIPEALVPFMGGKTQISKPVK

SEQ ID NO: 823 - protein, 205 aa, Staphylococcus aureus
MPFTPNEIKNKEFSRVKNGLEPTEVANFLEQLSTEIERLKEDKKQLEKVIEERDTNIKSYQDVHQSVSDALIQAQKAGEETKQAAEKQAEAIIAKAEAQANQMVGDAVEKARRLAFQTEDMKRQSKVFRSRFRMLVEAQLDLLKNEDWDYLLNYDLDAEQVTLENIHHLHENDLKPDEVAANAQNNASNTPDNNQQSNDSETTKK

SEQ ID NO: 824 - protein, 917 aa, Staphylococcus aureus
MDYKETLLMPKTDFPMRGGLPNKEPQIQEKWDAEDQYHKALEKNKGNETFILHDGPPYANGNLHMGHALNKILKDFIVRYKTMQGFYAPYVPGWDTHGLPIEQALTKKGVDRKKMSTAEFREKCKEFALEQIELQKKDFRRLGVRGDFNDPYITLKPEYEAAQIRIFGEMADKGLIYKGKKPVYWSPSSESSLAEAEIEYHDKRSASIYVAFDVKDDKGVVDADAKFIIWTTTPWTIPSNVAITVHPELKYGQYNVNGEKYIIAEALSDAVAEALDWDKASIKLEKEYTGKELEYVVAQHPFLDRESLVINGDHVTTDAGTGCVHTAPGHGEDDYIVGQKYELPVISPIDDKGVFTEEGGQFEGMFYDKANKAVTDLLTEKGALLKLDFITHSYPHDWRTKKPVIFRATPQWFASISKVRQDILDAIENTNFKVNWGKTRIYNMVRDRGEWVISRQRVWGVPLPVFYAENGEIIMTKETVNHVADLFAEHGSNIWFEREAKDLLPEGFTHPGSPNGTFTKETDIMDVWFDSGSSHRGVLETRPELSFPADMYLEGSDQYRGWFNSSITTSVATRGVSPYKFLLSHGFVMDGEGKKMSKSLGNVIVPDQVVKQKGADIARLWVSSTDYLADVRISDEILKQTSDVYRKIRNTLRFMLGNINDFNPDTDSIPESELLEVDRYLLNRLREFTASTINNYENFDYLNIYQEVQNFINVELSNFYLDYGKDILYIEQRDSHIRRSMQTVLYQILVDMTKLLAPILVHTAEEVWSHTPHVKEESVHLADMPKVVEVDQALLDKWRTFMNLRDDVNRALETARNEKVIGKSLEAKVTIASNDKFNASEFLTSFDALHQLFIVSQVKVVDKLDDQATAYEHGDIVIEHADGEKCERCWNYSEDLGAVDELTHLCPRCQQVVKSLV

SEQ ID NO: 825 - DNA, 52 bp, Escherichia coli
gtctagcataaccccttggggcctctaaacgggtccttgaggggttttttga

SEQ ID NO: 826 - DNA, 49 bp, Escherichia coli
agcttcaaaaaacccctcaaggacccgtttagaggccccaaggggttat

SEQ ID NO: 827 - DNA, 17 bp, Escherichia coli
tgtttatcagaccgctt

SEQ ID NO: 828 - DNA, 18 bp, Escherichia coli
acaatttcacacagcctc

SEQ ID NO: 829 - DNA, 23 bp, Staphylococcus aureus
cagcagtctgagttataaaatag

SEQ ID NO: 830 - DNA, 18 bp, Staphylococcus aureus
tgttttatcagaccgctt

SEQ ID NO: 831 - DNA, 26 bp, Pseudomonas aeruginosa
gtcggcgatataggcgccagcaaccg

SEQ ID NO: 832 - DNA, 24 bp, Pseudomonas aeruginosa
ataatcgagcatgagtatcatacg

SEQ ID NO: 833 - DNA, 20 bp, Pseudomonas aeruginosa
atgcgtccggcgtagaggat
